United States Patent Application Publication US 2025/0051766 A1 - sequence listing, part 8

SEQ ID NO: 5065 - DNA, 58617616 bp, Homo sapiens (residues 13,026,139-15,197,161 of 58,617,616)
  source 1..58617616: mol_type = genomic DNA
ggagctgttttggctgggatttggctgtcagtatgaaagtaatttgatttcatagagagtgaaaacaaggacgagattccttgagctctttcccttctccttatttcagctaaagtggcaaggcctcaggatggatgcccacagccctggcactggggagcagagaggctttctcggggcacaggcatggcagggagcagcgttgctgtggaagaggtcttaaacaagcaaacaaacaaaccaaaaaaaaaaaaaactctgtaaaatctccttttccttttgtgttccaagtagttctgcttctcttcgcttttccagttttaccctgcattttgggtcagggtggtttagttctcctcctctgttccttttttcccttaccctttccctttttataatttctttccgcttttgttttcttacaaattgaaacagagatggctggttaatttttagcctccactcagctacgcccaatttactgccgcctttgaaacctaaacgggcggcactctgtgattaagcaaggcagaagtgtgtttacattatgcccaaccaacttgtaatgagagggctaccaaacctttctctctctctctctctctctgtgtgtgtgtgtgtgtgtgtgtgtttcctttccaccattccagtattttttccccttcattttccttcttcctctctttatgcgaatttgagagaatgtggcttaacttcaactctcgcaaaggttgtttctccgcgagtgtgtgtctctgtgtctttcttcctgttcattcacaaaaaagaaaagtgattcacaatggctgtggtcacccccttgcctgtttgggaagttgggaggaatgatataactggatccagaaataaaattcgggtttgggggtgctttcagcactgcgtcaggaatgtaatctagactagagtgagccctgagtttacatgttggagaactgtggagaggagaaggtggtattggaattcttgtcctgagaggttgctttggtaactggttagaagcaggggacaccactctcaccccccaagtctctacctacttctgtggatctttctaggcctgcatccggccctgtgtgaccatcgtgacccgtcatgcagaagggccaggtgccagtcattccccctcccttcagcttgaattttttcttttgtcttttttctttttggaaaacagactgagagggaaaaaaaagttatcccctcattctctgtctatacagcaagccagatttgggagggtgtgtgcctggtagtattggaggtgactggtggcttgcagaaggctcggagcctcgagcttaccagtgtggccatcagatactcctgcacaaggggattctgcaccttccaattttagaaccaggggctcgagagcatctaagatgaaaatcaacactcatcttcctctgagctggcttcctccaaccccgctctctgactggatccttgtagctgagttgtttccctggcctcttttattttaggccgaattcttgactgctgccagtgtggggctaaggtaggatgaaaagtatgtgaggaagcagaccgtttcctggccagaagaaaggccccaccatgcctccctgccagcttaagagatcattcgcccaggaatatgagtgaattcataccccattccatgtagccgaggccacttctctgggctggggctgaggccgagtctcctctacaaaagcagagtagggaactaagggtgtattttatatcattcaggccccagactccagataatttcagtgaaggtaggatttttctcactggaattgctttagtttgagtgtgccttcctgaagtgagttgaggcgagttggcgcagcccgggccaccagtgggctgcatcacttgttcctctttggagttgggttgggtggtcttgagatggcacagaccaggcatggcttgcttcctccttgagctggcaagaaataaaaacatttcttgctttgctagaaaatgtcttctgtggctgagccaccaaagagcatcgatctgtgggcaccactttctccatgcccatgcctgccaggcacactcagcagagctgccacttgctccttccttccaggatgataaactggggacaggggccgggatggcacaggctcagacaagagctgctttggactctgaaataagtgtttttccttttcttaagacagggctgaagagccagatctgggctgagctgggggtcctgggtttcatgacagtaacggtgatgtggtggtaaatgtgggggtgtggctttgctcccaggtgccattgtcacccatggccttcctgagcccttgttatgtcccagatgaagcttcaagagatgacatgttcgagagggaataaaggacgtgtgtttggcgttgaaactccactcccagaatactgggtccaaatacagaatactaggtccaaaaggctgccatgcggctggccttcctgctgggaaggagtctgtctgtgtgtctgtctgtgtttaggaagggaggttgaggcagggcagggtcagagagcactgccgtggggaggagggtatccatttcctggtgatatccttccattcaaagcgggtatcccagaacaggtggccagggacgggtgagctggggagggccaggagagagatctctgcttgtgtgagaaaggatggccgagctggcctagaaccgctgctagactatctccaaagtttctgcagcaccctgaaggtgaaccagtgccttcagaccttccctgacacctaagccttggtcctaggaaagaaaaaaaaaaatccaaagctaacaaaatacttgagcgaatggaactgtcagcgtcaccctgtcagatccctcctgtgcgcctgcagcggaatccccacgaagtccaggtatttgagtggtggctcttttctttatctaaactctttaatgatggagagcttcccacatagaaagaactcctgtgtacccaccactagtgccagcaatcgccagatcacggccaatctcaattcaaccatcctcccaactgcccacccatgctgagttatttagaagatccaggcattatagcttttcatctgtaaatgtttttgtgcacatctctaaagatacggactcttgaaaaaccaaaccacaataccactattatacccattaaaaattcagcatttttttttagtatcatcagatactggttaatgttcacatttccctaattatcacttaattttttgtttatagtttgtttgaatcaggatccagatggggtcagtcctgcattgcgatgggttgatcagtctcaaaagactcatcataatctctaggtagtccttctcctcttcctcttccttagtcttggtttcttttctggcagttgtcattgttgttgtcgttgaaggaaacaggttgtttgtcctgtggggtttcctcagctggactctgcaggctgcgctgccccgagtgattcagtgagtgtggtgctctgagagcagattcggcctcccctccctccctaccttcaggtcccgggacagctgagcttagccttacctgtcgcaggaaatgggttagcacctgaagatttgtctaagtgaactttttcacctgtggggttgccttctcaggtatgagagcttcttggtttcggcactctagtttagggtttggggctttgtagcaggcactagttttcaggtctgagggagggctgcccatccacgtccttccttggcggtggagggcattgttcagctgtgtccatactgccaagacggggctggtgccagcgaggttccccaagcctttgctggatgcccaacccgactgttggctctggggtgagtatgtgggagggtccacaggagcacccgccgctttctccaggtccacccccaccatggaccctgtgccgcctcatccattgcctcctttttcaaggcccagaaatgccactggtctgcgtctttgaggcagcgccatctggtgccagggctgacaaagatcgcagggccctggaactgacgcctaaaattagcaggatctacagattatcttttaacccaatgtagggtcccctttagaacatcccagaagaggtgtcactgtcattcaaaggtcagctttggttgtaaaattcttccattcttccatgtctagcttgtaggatggttccagggattaaaccagctaatatgtaaagataccggcacatagcaggacggcagctgctgtgattgaggacaattgttatgatttagggagcccaaggctgactctctgtcacctttacttgttggtcttttttttctcttaagggatgacccaggtgaaagctgattttcctgtaacaggacagcatttgaaataccaaaggcagctcttatgtctcccttccacccttctccccaggaagctgtctcctctccagcctgaatatcaccagtccctaatgcctcccacatttcacatggctcctagtgcccttgccattttggtaaccacctcctggaagccctctggtttgttttggtccctctgattcataaaatttctgaaactggagtgttcagaattgaacacagaaactccaagcatgatcagatcctagccagccatggtggctacataattttcagggccttccagctacatactgtgcagggctcagtgcaaaatgaaaatgtggggctccttgttcaaaatttttaggaattacagcacgacatcagttagagcatttaaccaagcgtggggggcacgcaagttgcacacccgtgaagctggccctggccacctttgttttggacattcgtgtctgttaatacaacttggggtgctgggtctgggtgatgtggaataatgatggggctcaggctggcctcagagcggggcatgaccccaaagaggagaacagaaatgcccagacccaatccttatgcttgggcttggtcttattctcagactcctttgaccacctgctcttgtcccttttgttcatagtgctgtccacccaaccagtcaagagctcccattgcctacaacatgcagggggtttctcagtagagtgcttgctctgctggctgaattggaggctatgacatgggggaaaaaagagtcacctttgtcggagcttgagccagcaaagcgccgaccgtgaacaagccagaggggacctagaggcctgatcccataattatgggcatggtgaccagccgtgctctattgctgacccagaggaaacagggctactctgcagcagaagggctggggtccagacgtgcagaaggacttcctgagaacttggtttactttttggcgcttccaaagcatggtagaattccctttatccatgaaatgcacacttagtcaacttactgtgagcaaggtcctggcctaggggttcctagatctctaagaataagagaatcttgcgtgtacctggcaggctttgggtaaaggcccgatgatatcttctagaaggcttcctcccgtaggcgtaggcgtgaacctgcagtgacccatgctggaggggagggaaagcccaaagggccttatttgggggatagctcacagtgggctgtgaattgggaggcaaggtccttcttggccaccctctagtgttacagagacctgggatgccagaggaagagtgggttagaaggggtaatgaggccagtgctacgttctccctctgtcctggcttcctgtagcagctgggcagagaggggacagctgagtgtccccttttctgcctagggaagaaggtgactccctccccacccctttttctctttgccctgtccgtcccatccctccacccccgcccttctgtctcaggagctgccacgcttcagttattttatccttcagtgtccgattcagaagtcttttcaaaggccccagccgtgtcagcgcggtgctcgcacaaaaggcctctttgatttcttgtttgttttcatttgccagtggagggggaggggggcaggagagaaagagcttctgggttttaaaatttttatttgggttgcttcattctcagaggagttggctccctggaactcctttctgagttgggggctcagagttgaacggcagccttctgaagagagggctagtgtaggagtggagggttgggtggagctcccagggtgacaggaggaggtgtaggggtttaaatatagttattgattcatcctacaaacactttgggcagatcttatgtgctaggcctaagggcagccctgcctgttgggtagaggaaaggtctgaggtgtctggcacatgacattcccctgtgtgttgcatcgttcgaggactcctcacagctgtggatttgcacagttgtgaactttgactttgttatttttccttttttgtcccagattccgcctttgaagggattctactagcatacacacttcttggagactcagtacttcagaatacaggttggggcttcccaccctaaatcagagaatgagggagagggagtgagaggtttatagagcagctaggtgtcttcctgggaatggtgtgcagaggacctgggcccacagcttgttttggactttgagggcaggtcagtgctgctgagaccttggtgagtagggagttgaggccaaaaagaaatggaaggccatgtttgtccaaggtttcgaacaagagacacccaaaccagtgcctgttggggtgcgtaccttaacacatgtgggcacgtccctatatcccagtaagaagaggtgcagcctgctggtttacatgcctgtatggaggcctaattgtcagggcttgggaagagagtgccacagaccgagactcaggcaggtggtcacgggcatcagcaacagggaagtgtgcccattgggtgagggggggctcacagggcctggttggcagacgggaggaggaggctggggggctgagagatagataaatatagctgatggcatttctgatgataggtttttcttggcaccaagggcaccgtggaaaacagcacgacaaacgcccggccctgcaggccgccgtcgccattttaagcatgtttgagtttaagggttgttggcgttagaatagggtcccaggaggaggagggcctagggaggagaagtttggctggactggaccttaccccccaggtgcctgggtcccttactttgtctataatggatatctcgtaccttatttcctggccctttggggatttaaaaaatattctggggctgccctttatgggtctgtctcccaagtgacttatttcaccaccagctgccatggactatcagtagggggcatcttggctcttctctcactcctgatgccttactgatgacatggcatgccaccaccaccccagtacagggtacttattagctgttatttggggacacccaataacttaaggggcacctgtttgtccaggctcctaacaacttcttgtcccctgtgggcatgcccttggtctctatcccctgctttaattccatttttccattgaaggccctctatggctttagcaccaggctaagtcctctctatgtattaattccctgaattctcaccctgattctagttttaagcctgtgctcctggctgggtgtgtgtgcactcaggtgatgtgcataatatgtgtagtgaggaatcagcaaaccagacctggggaccagggaggcttcctagaagacgacctacttgacctgcaccttgaaagacagtgaggaattagctcgttttgtcagctgcctgagccttctcagtgtgcctggagctgattccctcctcacaatggttgagtgatatagacagggcaggtattattgtatctactgtacagaggaggacccgaagtacagagatgacaggggactctggtcacatgatgagtttctggcagaaggggccggcttctaggtcactgagtacctggagctcattctgagggcatcgctgctccttgaacttcatcaggattactggctttggcagagtctcagaggagaaaacctcaagggtccctgttggagccagtttcatcattgtggtctctgtcactctctagaagagagcccagcttgcggctcagctcaagggctcccccagtggctgagtatgtggggtggaaacagagaatgggcacctggccctgtcctgacactggcctccctccctcctgacaggccatggctccctggatccctgccaccaacctcgagaggcagcatgctagcatagacgggctgagtctagcatagacaggggccaggttggctggatgctctcaccctgctgcagccagctctgcttcttttcatatctccctggagcatgggggagggatcccacctgaccttctcaggtagaggaggcaggaagtctaggtgtgaggccaggcaggttctgctagaccttgggattcctgatccttgcactgtcacacccttttcctgggagtgtccttggaatcagtttgaaataaaaatgaatgtaattatcataattaaccaggtgatcgctggaagttttacaataatctgctactcattgcctttttcacttcttcacattgactctcacctttatccctttcttaaagttggaaaactctcggggtgtgtatataaaaactctcctagcatgactaaggctgggttcagggagaggctggctcaccgctctagattttcgtctgtgtccatgataattagacagaggcttacctctcaccattgatatcagctccccttgagcagcatttcccaactgcggaactgttgacattcgagtgagatcattctgtgtcttgggggactgtcttggacattgtagagttttagcggaatctctggccttgacccgctagaaatcagttgcacctccctccccaaggtgtgacaaccaaaaatatctccagacatttctaagagttccctgggaacagaatcatgcatggctgagaacctctggcctggaagaaacagggattcagacagaatgccacctgtgttcacctcttgcctcaccgccagtttaggtcctcatttaccttgtgttgaatgtcgactgaacctctgagcatcgtctactcctgtgtgtcctgtgttgttttcgcttttccggatagcagagccctgggctgaagcagtttgggggctttcccctttcacctccccctggttggaactgtaagcctgcctccaagtcccctactgagttattcctctctgattttttgcatagtggtctctgtgtgctggggctgctgatctggggaacaggacaggggatctgctactgggctgacccaggcctgtgcagcaaccggtaatcctgtcaggcccgtatcagaccccaaagaacagcagacgtttgtttctgcagcatgagacacggagaccagaactgttgtctgggtcttagtactactctttttaaatgatttgattttttttttttattatagtagtaaaacacattctttgtaaaaatttaacaatagagaatgtgagagacagacaggttccccaaactactgtcctgtgcctgagacaacttcacttcgcagatccatgttagttcttcgaatttttttcatcaattcatatatcaagtaacttttaaatatagaggtatctattttaagagcagatggtatgtttgggctaattgaattggctccgtcaagtgccattgtggtcttaactcttcccacccgctgccttttgtacccttgcccgcatcatcccaagtgcagagccaatgtccctgtcttcttttccctgaggtgacagtttcagcgtgtcattcctgggaggagtgaccaacagggcatgtactggtgtctgagtggttaggatcccactctgggggattcctgctggtggtataaccccgaccacagaagtcagggcctaagcctcagcctgccctgagatccccaccaagggggctgcggctggagggaggggcccctgggaagtatcctgcttggctgcacctggcttggcctctggagtcgacttcccaagtctcctaggaaggcgagggctctccttcgtgtggagtagacccttcgccaactggcctggcgtgtccgggaggcttcctttcttaaaatggggggatgaagcgtcagtcatgcttccaggatttatttcatcataattgtttgttttgggtttaacaatacagcagggagaagagtggcagaggaagaagagcgtcctctccaggccaggggtggggctgtggaaatgagaaaccggacgagacagagagggaatccagagagggctttgcggttgagtctgccagtctggagaaggctgctctccagacagctgagagtagggtgacacctggtgactcttgtggactgggcggagctgtgtggagcgatcgggagatccccggaggcgacctgcaggaggccagccgagtgcagcccttggggagtgtgtccttattatgcctgcagattatatccccattagcgcataattattatataatgggcgttattgcataatggcagttatataacaggtggcccagaatacagacagggggtgtaataagtgtatatcctctggctataaatagccaccagccccacaccaaatatgtggtcacaccagagccaccttataaatacccgtgctgggctataaatttctgagcagtgacgtcagcgggcatggtacctagttagggggtggtaggagggacctgcggccccacccggacacatgacatcattgtttccttagtaacaggaatgctcccgggggaccaagtgaagaaaggcctttaaagggaggaggcaaatggataggaagcttgagttgggggtgggtgctaagcctgggctgaacagggtgaggtctcctgggcagagtccttaatgggtgagacaggccatctgcccttgggtatttgacccaacgggaagcaaggcagtagactccgtttcctttcatctttagggggtctcaagtcccctttcctgtgtgtagcagattctgccagccttggctgtgtgtcagggagaagaggggagctacagagtcttccctgtccttctctctcccaggtgacctctacagggctctggggccacttgcttaagggagacccgacttctgcacccggtcatatcctccccagggcatgaccacttcccctaccagacgtagtaggccagtttcagccttagtaatctaagaaatatgtgagcaatttgatgcggatctcagagagcctcgtggaagtaatggcgctgagagatggcgcctggggaagaaagaggagacaaggatagtattctggccccagaagaaactatgaggtgggatataatctttttaggtgtatgggagattgcttcatatagggtggggaagaactagtcttcatagccctgagcatagaggaggaaatttgcctttggcagatgaggggattggaagaaggctggatgaccaactcgtcctggtttgctcagagtttcacagcccctcacctcggtaaacccctcagtctccagcaaactgggattgttggtcaccctagaacagtgattttcaaccaagggcaattttgtcccgcagggaacatttggcaatgtctgtgaacacttttggttgtcacagttgtggggggagggtgctattggaatctagtgggaagagtctactgcatatgacagtcccccaggaacaaagaatcatctcgcccccaaacgtcacaagtgcggaggtggagaaacccagccttagagggagaataagcagaccctgctgtgcgtggtctctcctcaggacgcctcttgcctctgctagcagagtgggctgcttggctgccttcctgaatttcttgcagctcttgttttctgtgctttgattggttgtgtttagggttctgtggcctggaaaccttttctaggaaatcgtgtggcttctgagagggtctttcccatctcaaagctcagagaccctttgagacagtgccatctcaaagtgagacagtgctgacagcaagccctgccaggcagtatggtattggtgtggatccttcatctgttatttaaaaaagaatggaaaaatcatcaaatacctatcccttattgcctaccaaagagtttctaaaaggcaaagcctgcctgttttccctgcctttcaggtcacctcttcccatatagacctgaacaggccactgcggctcctggggcttcctgagcgtagcagtcccagggtgagaactcacttccataaaagccagtttcccagacccagtgaccagggctggactctgccacccaaagaagcttcccaaatgaaacaaatgaggcaggagcaggagagagccaaatcctattctggcacatggagtttacagaaatctaggttctaagtgttctcatgtcatttatagaagtttccgtttagcccggcatatgtgaaatgtaatcatgaaagcatagcagacactgtttttcacctgcctttagtgcctgtttagtttactacctggctgcagttgacttggcgccctctggccttgaccacatgcatagcgtggccaactgggtcatcgtttctgctggcctcggacagggcccacagatgaaggccaggatggtggtggtggcgcagtggtctggtctgcaccagagatttggccagagagaggggatcagctgggctgtgggctacccgttgtgtgtgtcaggcccaacttttgagtttggacttgagattgaggcagctaataagcgtggatggggaggaagggcccaagggtctacatgcaaggtcctgcctgctgtgccaaaggggactctgtggggaacagtgctggctccgaacacaaaggccattgctccatggagcaataatcctcaggatattgccagcccaaaagatatggccaagagagaggcctctgccctgaggacaatggccagatttctctcacttatttatggtatcgtggtttacaaagtgggcccagcacacaaatctctgggcatagtttcaaatacatgcatttcttttaaattaaacacccccccccacacacacacatacacgtgtgtgtgtgtgtgtagggtctgttcaagccctgctgctgcccaggagtgttcccagccacgtgggacagtaactgaggatgatggtactgaagccactgtctaatattagattttgtaactcagagattcattaatataattactcagatgccagcctggcttggcaaggcctcttgaattgtgttcctcttcaacaaagtgctccggctgcagaaatgcccctggtgagcctgagctctgctaccttgcctgtgaatggggcagaaggcatgtgttggcctcctcactgcaccctgggagaggcagtgcatccccatggtggcaagtcttgcctttacatgtcttgtcacgaaaacagggaccttggagagtctgctgcagaggggagcaatctgctgggcgaggccccgtttctatgcaagttggccctgggctcagctgggggccagtttattttgctccgttgtgatacttagcatgcagtttttagtttctcttaggctggaatcttggagctgggactgtgttttatccgcctttgcatctgtctctcgcgcagcttatagttttatacgctccataaacccattttgaatattgaattaccttcagatgggaagcagcccatggcccatccttgagatgatgtaaaggctcacgatggtataaaaatcagaaagggggctgatgaaggaagagagccaagatgggaaagtggcaggtgtgctctctgagtgggcattatgaggggagaatcctgacagaggaggggcagtggaagcttccagaatgctggaaggagtgtggcaggcaagtgagaagctgtgggttaatgggttcaaagagacttggtttttcaaaatacttgtttttattttatgtgaatgagctctcaggaaaatggggaaggagcagccttcttctcagccccttccttcacccctgcccccgctgagtaccttgttacaggggctactgcttggtgggctcagcccaccccaccctctcataggccttttcttggtctccttggctgtccctgctaaatagtcatctttggggacatcctcccttttggccacaaagcacacagccccccagaggccatgtcctctccagacttggtctgcggagcagccaaactcactcgtgacagggtctcttcccgtgccagatcttccctgccacgctagcctggtggatgccctgcggcagggattggcagggatcagtcctgggcccactgggattgcttgccttttgctctgaggcttttcctcgcctccctccctctcctcaggagccctggcctccaggctccttgtatggacagactcatggctgctattcctgccctccatctcctggagaccccttcagtctgggcctctcgggtcagagatgactgccgtcctccagctggtacatgtgcttgcggctctggtagctgggtttggttattaacaatgaattattaaaggaatgtgaatagggagggaggtttgtctttcacacactcgcgcacacacacagccacttctcgaagcagatcttaaagttgattctgctgccgctgctgtacctttgcttgcctcggatcttagaactgtttccagtagtttttgagtgaattccgagcactccactttctaccttaagactctctagatagctccttcctcctctctcacctggtcctaaacctctttcctctggccccatgtgccagttcttgactttctctgagaccggttttcccctctgaagtcctccttgttcagtggaaaggtagctagaggcccaccaggcacccggtcttggtagtgtcacatgccacagcatgacagtaacatgaggacatttccctccttgctaccactctttgggctggagtccacttgagcatgaaagttcaggaggccaagcctgcctctcacaaactctggacacacaggggcttagtttcacgatcagctgattatgttgttctatgatttggggagtgtgcctggtacgtacagtccctcatctgtccactgttttaaaaaggttatttttcttattataagactactgtacattcataataaaaatacaaaattagcatgaagtcagggggtggaaattaaaattatacaattatgccactgaaataactgctattaacttttgttgcattttcccttacttattcatgcacatattttattttttactggaatttatagtatagacacttagggatgctgcttttaaaatttaatactgcagggcgcagtggctcatgcctataatcccagcactttgggaggccgaggcaggcagatcacgagatcaggagttcaagaccagcctgaccaacacggtgaaaccccgtctctactaaaaatacaaaattagccaggcatggaggcacatgcctgtaatctcagctgctcaggaggctgaggcaggagaatcacttgaacccgggaggcagaggttgcagtcagccgagatcgtgccactgcactccagcctgggcaacagagccagactccgtctcaaaaaaaaaaaaaaaaatcagtaccattgtgtattctactatgtcgctatttttcaaaatctaatttttagtggtttagcatcttttctttttcttgtttgtttgtttgtttgttagtttttgagatggagtctcgctctgtcgcccaggctggagtgcagtggcgcaatctcaggtcgctgcaagttccgcctcccagattcacgccattctgctgcctcagcctcccgagtagctgggactacaggcgcctgccaccacacctggctaatttttttttttttttgtatttttagtagagacagggtttcaccatgttagccaggatggtcttgatctcctgacctcgtgatccgcctgccttggcctcccaaagtgctgggattacaggcatgagccactgcgcctggccttagcatcttttcttgttagctgcattacccctaaattgtcaacttttctaatgacttctgtcccctattcccttttgaaaatgagaaattacctcttattataagtgtaataggtgcttactgaaaaataaaaacatgcttttacatgcttttttttttttttttttttggagacagagtcgctgtcacccaagctggagtgcagtggcactatctcagctcactgcaacctctacctccagggttcaagcaattctcatgcctcagcttcaggagaagctgggtttacaggtgtgcgccaccacacctggctatttttttgtgtgtttttagtagagacgggatttcgccatgttggccagcctggtcttgaactcctggctgcaagtgatctttccgcctcagccttccaagtgctgatattacaggagtgagccaccatgcctggcctgaaaaagaaaaacatgcttttaaacagcttcatgagatttcatcatgccagagctgatgtaaaccccacccccacccccactgaggcctttgagttgtgttgcgttcatccccattgtaaattctgctgggatggacatcctattacaccaagctttgtagctgtatttgttaccttcagctaatgcttcctagcagttgaattactaggcaaaaggtatggactctcttgaaggctcttcgtccatcctgttaaattgccatctggaaacttgacaccctcaggcagcacgcaaggatccatctcactctgtccctgtaccctgatcctattccccagagcctcagaaagatgttgccatcattgtacatatcgtgtacattgcacatacatgtcatgtcaggatgcacttttacaagtcaagtctcccatccctgtcataggtgtatgtcccgttcctgtatttattctctgcatcagctcacacattccttgatggacacatggtgttacccagtgtaaaagctaatcatggacatcagcccacattctcacaccctccaatccatgtttttatgaatctgaggtgcccccttccaggcctctgcagccacttcctgttagcactgctagaaggggagggacccttgggggtcaccgtggcatggcagtttcctctcagcttctggccttgggactgcagaagtggctcttgagactgtctggtggtgagcaggtgctggccatggtatcttaatggcagcagcccccaggtccacttctgaggtgcaagcccatgctggccgccagcacgtgccagagagctcctgaggaagcagctgctgctgacacctgaggccagctgcgcagtctgccacaaggcccctggggctgccaaggtcgcacatgtcctcccaggacttgaagggggaccaggggagggtgagctgttgctgtggactgtggactttgacatcactcatagacaccccctctctcacccttgcatcccagacagtgtcccccagggccatgcaggcagggacacacagcccccttgtgccctgccccaagtccctgtgtgtaagtgagcatgctctcatcagacttggtccccactgccatggcactcttatctgtgtgcctgaatatgcatgcttattcatctcgaaaactgggccgtagggccaggtgtggtggctcatacctgtaattctagcactttgggaggccgatgtgggaggatcatttgagcccaggagttcgagcctgggccacgtagcaagacccccatctctataaaataaaatttaaaaaaaaagaaaaaagagaaaatcgggccttatatcattttctacatcctattcggcccatggaagcgtaagtgtcttcagcctctgttgacccttgtcccccaccctttctctgtgatactccaccttacccagaacctgactgtcctcaggccctgggtagtgggagctgcctcaagactcctgaggccccacaagaggcttttgaattgcagcagtggatgtgggtagttgtgtaggacagagggaggcgacagcatcgtttctcccctttcttccttcagctggggctgtggcatggcagtgtgggccatccagtgtctagagggcttgtggccacgcagtcgtgggtgggatgcatatgttcatgaggtttgctctgttctttcctctgcagggtgttcaggatgtgctaacctgcgggtgtctgtgtgggtgtctgagtgtcaggaggtgggtgtctgtgtacaagtatgggttggggtgtgtgtgtataaatgtcagcttaattcacaccccaacaacgtaagaggaaacttctcagtcatgaggttcaagttcttgttactcctatgagctgtagtaggagtgcagtgagtagggggcacagcaggtatgtaacccctgggcccaactccaacctggcccctgtggcttgtagcttctgagtcagagggcgtgcatgcttgtgagaagtgtcaggcctttcccgttcgctcagcagctgagcagttcctttctggggttctttgtgaacctgcctcgctattaatctacctgttagtaaaagagattacaattgtcgtaattacagggcgctgcgtctccaccgtcaggactgagctgagtgagaggcaagggatgggaggaacccagccccacaggaagctgctattaaaagccctctgtttggatatggcacaaagacaacaacccttcccgggggctaaggagatctgggacaagaggcaggtcaggttccgggggtgaggagtgggctaaggtcccactgcaggctgtgggatgacacgggatgactgcagtactgaggatggtgagaacagcggtggcccgccggcagctcagatacctgggagcagcacagggctcagcaccctgaccacatgggctccatgctgaaggctgctttacttctggacaggccttcacctgcatagaatggaagagacctggtggcacttgtcatggtgagacagtggctctcttctgagggagctccacagccaccatggatttaggtggacaaacagtggtatcctggtctgtggctagcatgggccccagagctgtgtgtgatgcatgtgttcctgatagcacaggggttctcagtgagggtggttctgcccctagggtatatttggtagtggctgaaaacagttttggttgtcactacttgggatggggttgctactggcatctcgtgggtggaggctgggatgctgctagctgtcctacactgcacaagacgaccccccatagaagacagtatctagccccagcatgaggggtaatgaggttgagaaaccctgactgaggccaaggaaaggaacggcagcagggcaagccaggcccaaggagggctctaagaactccctgatgctgagtctggagaccttggcccacggtgctcagcagtctgttgccagggaggtaggagagaggggcagcaggcacactgggttgacaactgcactgtgttgaccccatggcgggcatcaggggaccacaggctgtggttgcgcctgtccgttctccctcccttttctcgtaggcttcttcctcctccagtgcaagagctggatccaggattggagaatttgctcttgcccacctctccatgtcctcgttgccgactgaggcacctgggagtgaggggcttggacattcttcctcagcttgagccccatggacccctccaggtgggaggagtccagaggaagatacgcagaaataggaagggctgacactctccagcttccatcttgcaaggacacaggccccaccctggcttctccccaacacacatctggcctggtttctgctctgagaaatggagctgggtggggcagaggcctggcaagtaaacctggatggagtgtaggaagcctccttccaccattcattcctgttgaccaaaggggcatccctgcaggcactcctgcctccttttccacttttgttttcaactttgactcccactaccaaggagttctcgggaaagagggtaggcctgtgggttaggagggcaccatggagggtagtctgtggggctgggtgagatgggtgtgggaacgcagccctgtgtttaagggtatgtgtgctgcctgcttgctgtgggcagggtggcttctgatgccctcccagcccttgggccactgtgtcttgtgttttctgcagacaaagcatggagattttcagctgttgtgaattctgcgtttcacaccgagtccctaatagtggaatcgcgttgccttccccccccctcttttttttgccttgacagctccaaccttataattttaccttctttttccttgcatacactctttttcttccctttcccgttcctggggcttttgccattcatcgctggggaccccctttaggagggattgctcctgacaagaggggaggggcttcctgtcaaacattgggagttgatgttttgtttggtaaaatgtctgtaaataggctgtgaggcagtcgttctacatggatccctgtgtatgccagcgtctttttgtgtctgagcatgtctccaagcatgtgaatgtcaggagcagagagaaagggaagggaagaagaagggaggagagagaagagggatggtgtttgggggcattgggatggctctcttccttcttggtctaaatcacagagcctgatcaggagagggtcagagttccagactcttgaagagtcaggaagaacatcagaagtgaagctactgccatctgaggtggccctgggttggctattcacagagggctggaatgggatgatggggctgtactccccactaaggctgccagatctggaacttgaccttgaagtctagttatccaggactcttaaggctctgagggtaggttgtaatggagactgtttctcctgcccagcatcaacgatgagccttggattcttgggatcaatatcagtcttccaccgtgaatgggaaacccatttctccctggagacaggttcctctgcaagaccactcccttattcttttttctttctttctttctttttttttttaaagtaggacgccttgttgctttagatggactcctttgttaagcttcaggtagcttacctatcctatgatttgatttacagcaaactcactaaaaacattggtcagtttgatttcaaaaacgtggccacatccattttcccgccatcagctttccagaccacagaatgctctgcttttgagctgctcctcagctgacaccctccttgaatccattttgagttgctcttccctggccccattagaaaatgtcggctctgactacaccatgcttgcgaacaaaggtgcagaacaattttggctgcttcgtccaggaaataaattcctcttcggtgccagaaaccattgagtggtgccatgtgttgagctctaggccccagaactgtgggcagggttattgctcagggtgaggagtgtggaagcataggataaggaggccatggggaggagacccttgcttcccggacatccccacgtactttgggtcaagaacctgaggacttgccatgtcccctgctctctctctcctggctttccatctgcagttgcccatggtatggctggtctgtggacttggggaagacaggcccctctctttgtcccatggtggcagcattccggcccggttaattgcatgccacccttcccaggtcctcttgttccgtctgctcgatgaaggtaaaggctgatttccctgggatctgcccatgctctgcttctcgacctgtgttttcacctgtaatcagcaatgccacttatcagtgtctctgaaccctatctcatttaagcccatgacagtccagtgaactcggcacttttataatccttgtgttatgcctagaagctggcagacggaagaatcttgctcaaggccacccactagcgagcagcagccctggggcctgtccccaccctgcacatctgcccctcactgctgaccaccctggcttatctcagggtctgatttctccttgtgaactctaaactcttctttccagctaccaggcagatgccttgtggacagcttgcccccgtatccacaaggtacctcccagtactcctggctgccctctgctccctgctccattccttgtcttggctgtgggcatcaccacctagccaagcacttgagccctcacaaccagactaaccacaggccggtgaaagggctgaagcctccctgccttttcaccaggctgagttttcagaactcagtgtcttctcctctctgttgtattttttttttttaattccccatctccccaggttggatttgtcttttattaagatataattcacataataaaattcactattttaaagtgtacaaggccaggcatggtggctcatgcctgtaatcccagcgttttgggaagccgaggcaggaggattgcttgaggctaggagttcaagaccagcctgggcaacacagggagacctcatctctgcaaaaaataaaaaataaaaaaattagcagtacttggatttgtattttattaagatttaaatcacataataaaattcagtattttaaagtgtacagggccaggcatggtggctcatgcctataatcccaacattttgggaggccaaggcaggcagatcacttgaagtcaggagttcgagaccagcctggccagcatggtgaaaccctgtctttactaaaaatacaaaaaaaacattagccaagtgtggtgatgcagcctgtaatcccagctactcgggaggctgaggcaggagaatcacttgagctcaggaggcagaggttgcagtgagacaagatcgcgtcactgtaccccagcctgggcgacagagcaagactctgtctaaaaaaaaacaaaacaaaacaaaaattagccatgcacggtggtggcgtgcatttgtaatcctagctacttgggaggctgaggcaggaggattgcttgaacccaagaatttaaggttgcagcaagcgatgatcacactactgcactccagcctgggcaggcaacagagtaagactgcctctaaaaaaaataaaaaataaaaaaataaactaaaaattaagcataggattcagtgccatttagtaccttcacaatgttgtgtaaccatcaccaccatctaattccagaacaattccattgctcccaaaagaaactccatacctattagttgttagtcccaattcctcattcctcctaggccctggcaaccgctaatctgctttgtttctatggatttgcctagttgtggatgtttcatataaatgagatcatacactatgtggtcttcatgtcgggcttctttcacggagcataatgttttcaaggttcctatatgttgtagcagcaagtgtcagtggttccttttttttttttttttgagacagagtcttactctgtcgcccaggctggagtgcagtggcgcgatctctgctcactgcaacctctgcctcctgggttcaagcgattcttctgcctcggcctcctaagtagctgggactacaggcgcccgccaccatgcccagctaatttttgtgtttttagtagagacagggtttcaccatattggccaggctggtctcgaactcctgatctcgtgatccgctcacctcggcctcccaaagtgttgggattacaggcgagagccactgcacccggccagttcctttttaaggccaaataatatttaattgtatggctgtgccacattttgtttatccattcatacattgatggatatttgggctctttccactttgtggtgtgagtaatgttgcagtaaacatgcatgtacaagcatttatgtggatgtatgttttggattctctagggtatatacttaggaattgccctgtcctagagtttcataactgcattccttgtgcatcttgtctgcccagcagtgctgtccccttagtgggcacccagggtctctctgggttgggcccctgctgacccttccatcactgcatttctttacttctcctatactgcatattccagcatttggagctctctatagcccctgagtgtgctgtgctattcctgcctttgggcctctgctcatgtgtatctggcatggtcccttccccttttgtctgacggcctctatctttttacccccggcctggctgtcacctccttggtgcagccttgtcccgcatcacttctcatcctctgaggccagtccctccctctgagggggcctccattttgtccattacacaccagctttcagctgcaggggggtgttacccaggcagcttctctggctctgtatctgtgtggttcctggcgtctagcaggtgccaacaaacacatgtggaattaactttaaggcactgcatgtgcttttccaagtgtgcatgtcacagatctgtgtgtgacccacacagatttgtatgtctgcccctgcagacatacaaatgaatatagaatcaaggtgtacctcccattactctctggacccctgggtgtcggtggcctcatatttgcttctctgtgacccagacaggacttggagagctctagagtgattctgaggaaacccagtcccctttaacccaaacaggtgacctaactgttccagactactggggaagctctggtcacaggggacatgcgacctgtcttttggctctttcccttcactcctctaagcatgtggctgagtagcctgcagacagatggcctgtcccttccgtccttccagaccagcccccttggagatggccctgggcagggagaaggcaggccccaaagcagcctccaggtcccgggagaaaagcatagttgctaccctggtgttgttggtaatgacttggcagtggagggaggagggtgcatacctccaggaggatagtagcaggggagccacggagtagctgccccatggcttgggtactgtgctgcagatctcatcgctgaaggtgtggctaaggctgtcccaccaggtgtttgggatgctgtctggcccctataccagccccactcagggccagagggctctaaatgagtcactcagctctggctttgccaggtggcccagggtagggggatgcctcaggtgggcacatcacggtgctgccaaagactcaaggaggaagaggggtgtgtctggccactacccagagctcactcagggtactagggatggaagggaagaggaggggaatgctgtctgacctgacagcattgcacaagtcagccgtcctgcaaggtggctctttgctgcttttcttctcgctggttctcccctgtccttctctagctgggattccagctctagtcagccagtgacatctcccccgtacccaggccagtgagccagatttttttccaagcctcaagtcaggcaggttcggggaggagacagcctctcaggcgagtgagctctagaggcccttcctcggagaagcccagccctcctcctcctcccttcttggccctctcctctccctgggcctcttccccacgtggctcattacaactccagttgttcaggtcttgacctcaagagccttccctattgacccctgaccagcgatactaatctgtgtcaacaggccccaggggttaaagaaacacaacccgccgctgccgccttagcaggtgcctggagggggcggggcggctcccgggagcagccgggcggctgcgggaaggcacttcttaggcgccgcctcctcctcacagcgcccgccttctccgctccggcttcatgctctccaggtttctccacttcctttgcagacctccctcctgccgattacccactcctctgtgccccatttcccttctgtctttcctttgctgtccactctgcttgcaggatttgggaccaaacgccctcaggcatccaggtggtgcccgggttgatatgcagctgcctgcccttgcacctctgggggcttgttaaaatgcagatcctggggcttgtccaagtgggtaggtctgggcagggctcgtgaatctgcatttccacctagtacccaggtgctgttggtcctccaggctttccccctgcctctgccagctgctgcctctctgagatgtgctcttttgtctccaggaatggagccatccttaggagacagaggcacactgctggccatctaggctgggggtagagcccagatgggagcccacctggatggcacgaaccacctgagtgatccccctgttctcagaacacaggtgggtcacctgaggatgtcctggtgacgatgcaggagctgccaggcaggaccaccatgagtcactgggggtcatgccagtgagcttcctgcgctgctggccctggctctgctgagggccatgtcagggtgaagggggcacactcctggcttagataagacaatccagattctctcagagaaacagtcacatgtcagacatgtgccctttcttgggctgaacctagagttgttcatagcctggccttaaccctgccgattccatatactgtgctcatctcgacccagttgaggctgtgcttctgtgcttcttggaacggctcggctccagggccgtgaggttggcaccccctgcacccgtccacacacacagaccagaggagtgaggatgatgaggacagggacattaatcacagttctgttctgcctggcactgcagcccaagtccccaggagtctgtgtcttcccatgttcccttcgtcctgttcacagggaggtggaaatccagacagaaacctgccttctcctccatccccacttgaagctgctggtactgcctctggccatccagccttaagacgtcccttccttccgtgtggccccacagccacaggctgcccctcctgcacagtgcacacatgtctggcaggagatggcccagagaaggtgctaagcagaatgcggggtagggcttcatcagggcctggtgtgctgggtggtttgacagtgttttgtgggggtctttcctgtagctccaggaaacctagatgggggtcaggctggctgagggagcacccttgggtgctgccctttttccgagtgctctgcttctctttgactttactctctatcccctagtcaccccaacccactccttttccttcttcctcttggctgtagctccctcacagggctggggagcaatagacaaactctccaaaaatattttttttaagtttcccaaacttttccagatgccaagaaggggccagggaaactgcaactgcagaggggggaaggggagaggaaatgttccaaggccttccctcccttccgcctggaggcgaggataactatgggagcagggtgactctggtgccctcagacagtccacctggaagggagaaaggcccctaaccatcccacccttgctaccctccagcccatcctccatcctcattcccaaagcccccagcagcatgtagaggtagaggcagagaaggatgtcagtggggcacctaggaacttctggggttcagaagggtggatttgggacatatacccccaccagttgagggaggtcaggagctgagaagtaggagaatctgtccccaagggctccctccctgggagtctggggcctgatagaagaacctgccactgctggggttgaggtgtgggggaacagacaggagggggtggtgtgtgaggacagtacagggatcactgccctcccccagtcccaccctcaaggggtgctgcccccacctctaccattctgtccatccactccctggacacctcctaaaacaaaggcctctttgtggtcctggcctactggcctgcggccagcggcattctttgcgtgtttcctgagcacggatcccagcttcgtggtcagctcctcccccacccagcctgcttcccggcctgactcctggtagctcagagcagtcccctctcctgtcctgcccagggtcctcccccagttcccgtctctaccgtggacagatctggacagagaagggaaactcccaggagcttggccactgggccttcggtgggggttgggggacaagtggaggttcaactccatcccagctccagctgactttggtgggtttcgccgagcctctgttgatatgttctcatctgtaaagatggggaaaataaccaccccttggggctatcaggcagattcaatgtctccaaaacacagagctcctgcttgccgcagagtggaagaggcagtgtgtaactcgagctccccatttctgcactgctccctgggttcctagggggctggaggtgggcttggtgggcggctgaggagctcagaggagtctccagagtcttgggtgggacgtttccctgcactcctgtgggtgccccaaacctatggcccactcctgggagtgctgaggccagtaccccagggagtcctactccaagagtcggagctgggtccgtagcaagtggcctgcctgtcctaggcctggtcttgctctgtgtgcccccagcccctcctggcatccatgtcactctgtaacagcagtggggtgtcctccctgggttaggcatacagggtggttggtgcctagagccctgaaaatagcagacctgaggagggcgggggtagggggaccaaggagggatggcccagcttttggagaacactttcgaatgtcagcagatgcacacccttcagtcaccagccacagtcacacacagagacacacacagtcctaatgaagtcctagatcactgctttggggggttttccccccctcttgttaaaaaatgttcataatttggaaagaaaaggagctttttacaagctggcggctctagagaactttccgtcggttctttctggcctcgtgatgggtggggcccacttttcccttccttctctctctcccccgctctcctaataatcccccctttccagcctcaccaaacacacacaccctttaggagacctcccgccggctgtcaccccaagaaagctggaggaaagccgaggacctgtctgtgccctcctgggccccatccaagcgccaggcacaaccctccccccctccccactcctccctcccacttagaggttggcccccacaggcctagagtcttcagattgctaagcttcccagaatctgtgcctggacccaggcccagcagcctgcctgcccttccccgagggcctgccccactctcccgcagggtgagggtcccccgagtccttcttgcatccgggggccccgccagggagggcagtgctgagctcaccgcctcggcatctgccctccccctgcctctggtgcgagggccggccgcactcccgccagtgccttgctccctaatagctttttaagtccaaccacatgtgtctgtggagtgaggagccgcccctcacggggcctcggctctcctcctccctcagccaagaccaccctccacttggagcagcctcagggctgggggaggggggggtctgcctcctgagagcccatctgctcgccccgggcctagctgaggaagaagggggcgggggtctcttttgggagtgtcgcgtgaggccagccctcaggctcggctggccccaggttccccagcctctcctctgggtcctgcagtctaggatcctctctctctgtagggcaggccaggagggactggcttctgggtgtgggagcctgggtgaggagtcctcatctcacctcgcgcctccctggccagggactttggccagcaaatctctccttgcacccagccccacggaggtgaccccccagtcgcccctcaactcaatatacgtgtggttccctgtgcgtgtgagtggtctgtggggaggcctgtggggtgcggtttcgcaggaggggagtgagggctgaaaagcaacgagctagcaggcttggggtcctaatgagaaaattgcttccagccagggagccctgctctgcggctgaaattgcatccagccccagccaactttgctgccgcagtacccgcccttcggaaggagttggggaagcaggcgggcagggggaggagcgggctttgcacatgactcaggcccccccaccgccccgttctatatgaacacaccttgaagagtctcttctgcctcacggggaggagcttgagggtcaggcttggctctggacccgaccgtttgatccttgggaggcagaggagggagtggggagggatttcctttctgttttgctcagttctgctgcacttatgaggtgctcactgtgtgcagagggcttggagaggtgagcttgcataggctgggcccacatagggtgggcccacccacccggtggtattcactcttactgttaaagggtgttaggagcactttgttttcacaaagatcctgcgtggagtcccgccttctaggatgcttcatttgaaattcggcctccctggagtggggtgggaccctcttgcctgtccttccactcgggagcccagtgcctacacccgaggccagggaacccaggggtgaaaacctggcttagctacattcttctttctgttcctcacttacttggaccattgagcagaatcagctgcagaatttgtggggcccagtgcaaaatgcaaactcagggcaccttgttcaaaaattaagaatttcaagacagcaacagtggaagtcaaggttatgaagccagccctgcttccaaggaaagctggtaccacccagcagcccactggttcaggggctgtggcctttgccctgatctgaaacaggaggttccacctgcttgtttcctggatcctggggaatctcttcccaacctgggacggtggtctccctgctgctgcatccctcagagactctaactttctggattttagagatgttgcttagggaggagggctatgaggggagggaacagaatgagaatggatcacaccttcagtgcttagagagtctcagggcaaggccgcacttgtcacccttaggtgaacctgacagtggaaccatatccctggtgaggtggaacctgcagcctgctgggcccagccagtagcgggtcagtgggaccttcccctcctcgggtggagcctcccccaccaatgacaagttctgacggctgtgcctgtgcagagcggggagcgagcaggagtgcttggagggagggaagcaggcaggaggaaggaaacaaccccattgtcatcccccaaattactggctgggatggcaggggaggaggcggaaagccgacattgtttacttaattaaaagtaaacaacaatttgccgctgccagcctcccattagctgtgtgcgaggagccctacgagctgcagactcggctttcgctcccaccaagccggctcctgatgccacacccccagcctcggctccccagggccccgggccctcccctgctcatgtcctcctcaggctgaggagaggggaacaagctattaaaagtaaataaatacataaaaagaaaacccactagtgtctcagagtcctgtgggtcaggataagaatgtcagaaactgtcatgtggcaggccagcatggggcctagagacccctgagtgtgtacactgaggtctggttgtggtgggctgggcagggcagggggcacttctttgtccagtaagccagatgttggactacctggggaaggcagcccctcccttcctccctccctccccgcaaccgaggccctagtctatactacctggaagcctgggcctctctgccccaactcccactttttccttttcccttttagcagcttataaacatccttctcccatctttttggctctgctcccagaagggggctgttcagggatcctggagggctggggagagaggcaagctccttggggcctgaggggagaaagacagctggaactggccccacccccaggacagtacagctacaagtgaccctaggaacaggggagggggttgccctaagttggggtgaggtggggaccctcccagctcctgcttctctggagccttcaagcaggaggggtggttggatggcaagaggggttttgcatgggcttccaccaggctccaggggctaagcaggacacctttccagggatctgtcctcaggaaagccctcacctctcctgtaggccctgcctgcaattatgtagagcacaggcttccatctggacctcggtaggcatgacctgaggcccatgactttaaaagctcaggatgtgcgctgggcgcaggagctcacatccgtaatcaatgccagcactaggaggcccagaccagagggtcgcttgagcccaggggttcgagaccagcctgggcaacatagggagaacttgcctcttctaatagttaaaaaggggtggtagcatgcacctgtggtcccagctacttgggaggctaagtagctgggaccacagctgcatgctaccacccccagctaattttttaggagagctaggagggtccttaagcccaggagtttgaggctgcagtgagctatgatggcaccactgcattccagcctgggtgacagagcaagaccctgtctcaaaaaaagcaaaaaagaaacagaaaagaaaaaaagctcagggcccggatactgcagggagagaagtacaggagcacatgaaacgtacccagctttatgaaaccattgctgagcctccttctgggggccagacaggcaaggtggggaggggtaggtctgagaaaagagctagactgagtgaatgaaacagccccaatccccagggtgtgggggttgagaaccctggtctggagttggtccctccaggaagatgtaggtccccactcttccccggagccaccgtctcacctttctcttgtcccatcccccatcctcatttgcctcctctcatcttagtcctccaccattaggattcacacatccacatgcacgtgcacacaagcgcatagatcccgggattcgtgcacatcgggattttcacatgcactcacacacatagacaaatctgggaagtctgtcccatacttaattgaattaaaggactggggtttggcaggacattgtgtatctgagctgcagcctcttgcagccgtttcaagggctgatggttcagtctccctgtaattccagccgctgctgctccctgtgggcaggtggctgggtctgcgcctgtcgcctctccccttccccttctctctccttttacttcctaggccagagccccccagcacagggcctggggaggctggggacacccagtgtattcctcctcccttctcccacttgcattctgggagctagtgggaggttagggcctcctgaggaggaggtacccccagcgtgaggccaggggactgtcagaatagaacagtccaggcaaatccctccttccaggttttctgctgcccattcttggagtgggagctggaggctgcttgccactggttggaaagtggacacacttcttggccaagtgtaagccacctggctttaaaaggtggagagtctggtctaaggactttggggaaccctactggagtggccaggagccataatgattgggggagtggtgccagcagatggggtgtgctgcagggcaagagggatgctttttttttttttttctaatttgatttaattagaattcttttttttttttttttttttttttgagacggagtctcactctgtatcccaagctggagtgcagtggtgcgatctcggctcactgcagcctttgcctctggggctcaagcgattctcttgcctcagcctcccaagtagctgggactagaggcatgtgccaccacacccggttaattttttttgtatttttagtagagacggggtttcaccattgttgccctgggtggtctcgaactcctgagctcaggcgatccactcgcctcagcctctcaaagtgctgagattacaggcatgagccaccgcacccggccaagaggaacgcttttggcctccatttcttccctccacttcagcctctgctttggcaggctctggggtgggagtaagcctgttctcagctcccctttactagggacaggtaattccactctggctgctccttggagaacagagtggatgaactcagtccccacctctcagagggacctagtacagagcccagcccccactctgaggaagccttggatgggccattcctggcccagagcctgaggccattggaaagggcctatatctggaacgggtgaaggagagagcccgggagcctcactgtgggtgggaggggcgtggtcagccagccttgcctcctggggcatcagctcccagcttgtgctgcaccctctgaccacaactttgtggggcgcctgctgtgtgcagaatctaccccgaaacctatagcttaggagaagcctgggtaagctgctaatggctggtagtatgggtgtccaaggacctgttggaggagcccagtccagccctacatgtgtgacccttggtgcctggcaaggcgggggggtagggagcagccctcgcacagccagctagactgttttgctctggggcctgaggattgcggggccagggaagcaaccaggcccagtctggggccctgtgaagcgatctgcactgcccagggtcagggggatgggggggtcggcctcacctcggctaacctcccagcggaacaaaggggcctttctccacgcccgcccgggagggtgtgcccgcccggctgctgccgccactgcagagggcgctgattttttttttcttcctgacttttctccatttctgtctctggttcctgatctctgacttttattctccattttttcactttttatggggatggggtagagatcttccttttcaagtgtttaccaattgcagagacaagtctgcactgccaaaaggtgagggcatcctgggtgcgttaggaatactccgggagtcacgtggccttagacccccccctcccccccaaatcgagggcagctccgttctgaaagaagcaggcaggattcagagcggcagccacacagggtgggaccgggctcactggataacccccagtcaagctatgcacctggcaggtcccccgccttctattcgcccacccatttcgcagtcccctttccatccggcccatgcaccgcaagctgttcctaatcaatgcgaacgggaaactcggccctcatatcacgggatgtgtttggcagcgacagcaacaggagccgctgccacgggcagctccttccttggtgcataaaccagggtcccagtggcctgggcctgagtgggttcttctccttcctcttgggaccccctgggtatgcagagggaaccacatcccctggagctctgggccggtcgctggccgcgccccgccgcagccctcggagggcagctagtgttaactcgctgcgccacctagctatggcgtccaggagtgcagcgcttcgctccctgaaccgcgtcgcttcctgagccgcgccgctccctgagccgtgctgctcggcagcctggggaaaacctctttttggtccttcagggagctatgaatgaggaatttggcagctgtcagtcggaggatcagtgtcactttgttccttcagcagcctttgctgtccttatgcaagcttggtactttatagtatataaaactcaaagttaaaatatgttaaaaaaaaatctgtaaaaatccccactcacatctcatgttgctgagcaggtcttggttgtgttgcaccaagaagcaggagagacacactggaggtctaacagcagcaagtctaggatttggagcctaggcttctgattccaggcccagggctctatgcagcactcggtgccgtcctattcaacccatccctgcccaggctcttagggctccaagctggaaatttgcagtcaaaggcccagattcctcgtatttcctctggacagctctggacagtggctgccttcgggtctccagggcaaggagaagagcaggcctgcgagagagtgctctgccttcccctgctgtgctgttctcagtgaggctccagttccttcctctggtcattccagcccttgagtatggtgcaagtatgttcagtcctgtgtctggaaccagctcggctttgcaggaagattagcagcatcagggtttccacattaattcactggacatgagtgtcggtggttgggctgcaagaaagctattctttcttcaggagggggaagatgtcagctagctggtgcctctgttccctgggtggtcagtgtagccatggtttgaagaaggatctagaagggtctctttggagtcttatcatccactgcagctgtgctttgagatgtgggggatgtagcagcaaacaaaaccaacagagagggcttgtcctcaaggggctgatggtctagtggggtgttcctggtcaggacctcctggcctgagtggcctggtggccaggtctctggggctctcatgccttccagagctagagcctcccacttccccagccatggaccagccagaggttccctgtgtaggtgggatttggaggaaaggctgtttagtttccagcctccaggtgggagaagggccccacttaaacatctgattatggtgggcatttgtgtttgttgcttgtccatgagcccagggtcagtccctgctccaccaaggcaagtctctgggtgaaggaggcccctttggagtcaccagcctgggtactgagtgctctctcacaggggtattgagtgctctctcacaggggttgaggaagttagcacctgaggaggggaggcaggtggcttcagcctaactcccacttccccttccccacagggtgaattgaagtcggtgggttctacagttctaatcccaggccctgaggtttcctggatggattcttccaaggaaagggaacagtggagggaggcaggagcagaaccctgcttaaggccagaaagagagcagggggcagagagaggtggtgggggaggctgatgctccccaatccctgccgaccctctgtcctttttgatttcctcaggcaaataggcagagagcttagggaccttcccctgccctgggctaaagtgaatttcctgctctatagggtctcacttcttccaccttccttttcttagccagttgttccttctctgagccttctccttttccttttcttcttccttccctcccttccccagaagcattcaggggtgggtgagtaggggctccttgtcctggggtctccccagttcctcactctgctgagtgcccaccagacagatgctggcagctgcatgcagcccagcagttgtgcacacaaagccactcttgagtatctttaggaaagttttcctctttctgtttttttttttcttcgcccaaaggaataatttcctctctgctcttttttgtttttgtcccctttccctgcctctctcagaatcttgtactgtactgctctgattcttcttgccccagtcttctttctttgctttggccctgattctctactgtggctcctcctctctctccctttctctctatcttttagttttagttttgtcttttggttgctctctggctctggggcttcctgccttctcgcatccctcctccaaactcctgcttgtcccaggcgcatcccttgagtggcctgcagagcctccgcctcctgtttctcataccaggttggcattagagtctggaggactctgtccctttatgaataattagaccaagggcaagtgtatttgggggtaggaggagggtgatgcccagccctgggaggttgggacactattaatagccctaagagcagctgggggtgagggtgattgtctggccagcctgtcctgtcctgggcagctcaaagggccagaaagggcagtgctggaaatagagaaagcgggtgggggtggaagagcagctctgcaggccccttgctgggatgggaccccccccctccccagggcccctctcttttcttgacatgtggggtatggagggcattctccactgtcagtttttcttcgtcaagttggggaggggatagaagcttcaggggctgggggccgcttgcctggaccccaccatcacatgactcttggccccaggccctctcagaaatgctggctccagctgccggctgaatcgtggcaccagccagcactgccaggagaggcgcctggcctggacgcccatgggcctgtgcctgtgctcctggttttctcagctctctgtattccaaggctgggctgggctgggcaggccttgggcctagcactcccagagtctagggggacaagctctatcctcccttttccctgttggccctctctcccccacccctgtttctagtatggtgactgtcttgagaccgttggatggctattgcacaccgatgtggggagggatatgcctgtacaggtgtctgcccaggctctgccattatatttgcagagaaacctctctgttgctctttgtagatggtagtgggccaggccccaagggagcccctctgttcactggcagtggtccctgggtcaagacaccaaaaactgcaatctaggacacactcaccatgtactcaagagcgtgagctcctggggaggggagctgagggtcagccacagcttcccccaccagggtgggaggtggcatttgaacagagttgagaaggaggaataagcattcagcaaatggagatgaagggaaatagtaatccaggtggaaggacaggcgacatttatgtagccccaactatgagccaggccctgagctaagcaccttattatacatgttttctcatttattccttacccaggaatgctaatggtaggtgttatctcccttttacagatgaggaaacagttcataacttgaccaaagtcacaggctggtaggttctggagcacggatgtgaattgggggagccttggtatgccgttgctggccacccacctccttcctcctcctaccctccatttcagcatgcccccttcggcccctctgtgctggggcaaggccagctcacccaggatagggtatccacagtggtagagcactgtgttgtaccccctcagtggacacaggctccagaccaagggcacctccctgggtaggccaagggcaggctcagaggacaggggaagcagacccaggccaatggctcctgcccaagatgtttttctttgccttcttccttgcctgatctttgcctgtcatcttcaatctcttctgctctgatgggaattcctaccccaggtatctctgaaacaccccagacagtgctgctgccatgccctgggtccacttgttccctccatagtcaggtatctgaggtgctaggtttggtgctgggtcaccttgccatgggcagacacaggaggagcctgcaggcccactcgcatgtcccattgctgctgtggctgggggtctcatttattaactgttgggctgatcctggagtggccattggcaggtgggcctttgtccacctgctgggtgctctgttgtgcaccaggggcatatcccttctctctctcctttgctggccactgcctgtcatcccttggggaagagcaactgagcattcagttccccagtgcctcctggcttcttctgccgctccatgcctgggcccatctaaaggagttctccctgggctggggacggctgctaatgaacgggagccaagcagagaacgctgagtagctcacaccagaagaactccctggagggctccggggccacttgctggggatggaagggaggtgggagttctattgttttcctggaggaaaattttaagcttaggaacacctttctcattatatgagggaggcagtgatgggctgtgtggctggaaggcttctggctatgagtctatctccacatggggagtggaggcaaccaaggactgtaggagacaggccttcttcacctcgacaccgtgtggggcctgaggctttcagatgaagtgtgagactgctctgctggtctcctgggtacaagatgagctgatggacttgctttctcctcgcttcccgaagccttactgccgagctgtgagtcctgtagtagccaggcctggcacttgctccaggggcacccgtagaggccgggatgtgttggaatggagaaagtagttcttcctggggtcaggggatggagaggggaatgtcccatccagatgctggcccttcatctgccaggttcctgtgccttccctacccccccgcccccaacaatggcttttcttgagcctaggccctaggggcagccagagcaggcctagaccacatgtgggtgtcactcggtttcttcctctttcctgtcacttatcccctctgccatgtcctcttcccccatctccagcaggtcagtcaagtcaaaggcagaagcccctttggatctgtgagcagggagggaatgaggaaaggggagaggacgataatggggtgacatgttcccctgtccttatccctgcccccacccacagcttgcgggctctgcttcttgttcaggctccggctttaaaccatgtgagactctagggatgacagaggagggaaaaacctgccacctcaggatgactccaggatgtgtgtgtgcatgtgtgtgtgtgtttgtgcacatgtgtgtgtgcacatgcatggtggctggtggagcagggtgaggaatggagagaaggagaggaagatcctagaagccccgtgggcccagaccctggccaagcctcatcccccggccctctggctgccctgcattctcaaggacttccttggtcccctgagtctcctgtctgctgagacggggagaacccctctgtgacccgtccccttagccccccatctatccaccgttcccctcctcagggtgtctcagattctcagacttcagtttcaggaggcacaatagttacattctccagctctgattgctacaggcagggcctctggctccccttgagattgggtttcctgtgccctggacgctccagaatctcagaggaagcgggagagaagtaggaggcgggtgcagtgctgggagggccagtgattggccccagaatcgcatcagcccttcagaggatggggtgttgcagctgcccagaggcacccccagaacagaatgtacccccacttgcttctggaatgtcaggcctgggagggccaggggatgggcaggcacaccccaagggctgttctccccgtttccaaaggccagcggttcctgcagagttgaaggggattcctctctggtggctccagatgtaccatctcactccaccctttctggacggcaagaagtggttagtggcacctccgtgtgtgtgcgcgcgtgtgtgtgtgtgtgtgtgcgtgtgtgtgtgtgtgtgtgtgtatgtgtgtgtctgagtctgagcatatgagtgtatgcatccaagtgtatgcacatacctgggtatgcatatgtgggttcagctaaggccaaatctgtgcacacccctcagcctccataaaacttgttaggccaaagtccgtgggggcaattggccagcaaattatacatggcccctttcacagtacaagtttgtttcgagcaggagctgagggcagtgttggctgtagccagcaggaattcctccctcaccctagtgggagccataactacctccccatctgtaggtggaaaatatatatatatatattaaaaacatgcatccgggcacggtggctcacgcctgtaatcccagcactttgggaggctgagacgggcggatcaccaggtcaggagatcgagaccatcctggctaacactgtgaaaccctgtctcttctaaaaatacaaaaaattagctggtcctggtgacaggtgcctgtagttcccagtactcgggaggctgaggcaggagaatggcgtgaacccaggaggtggggcttgcagtgagccgagatcgcaccactgcactccagcctgggtgacagagcaagactccatctcaaaaaaaaaacaaaaacaaaaacaaaaaacaaaaacatgctgtcagttggagtttatgtgcaatcccaggctcctcctggctgctggagcttcccctccagagctctactgaagaggcagtgtcctcttggaaacacgcacaagcacacgtgcctgcaaacagcagaaggaagaggggggtgctgaagaggtgagggggaggcaaaggaaggacagagggaggggagccaagggagacagggaagtaagatcagaaatggggatccaaggggaaaggcagctgaataaaagaagtaaggtggggacttgttccaggggctgagaaggggagctggtgtgggtgtgagaagggcaattttgcaggagaactttgtggctgttccagaggttactgaggggcccccaaggaagagaggggcccagagtggccacttggctcagcctggctctggtctgggcactgccagaggcctccagcccacaagctgttgttgctgtggaatgaccagtggtgtgcagatgaatacagagtggccccagaacctggagccaaatcccgtttcaaaggcttcttcagcagagcccacttgggcccatgcggagggagtccagtcttattgcctgctccttcgtagccctcccttccagaagcctgcaaagtggccagaaccatgggcaggggaggcctctgcctcagagacatggatctcacgagtagcccaggtccccagagaaggacagcccgcagagctgcgtgtttgtgtgacacgagccagcctgacacccccaaacagcatcgagaatgagctgtgggctctgagatactctccctcccctagcctggcccagaaaccagggaccccgaatgccagcctggccaaggcacctgtcggacacagcggctgggctcaggttttaggcagctgcatttgatgggccaagtgggaagcagctaagagcacagaaagaactctccagcttccagcaccagcatggagggaaactctgagttggtgtggggcgaggggaagcagcagcacccactctatcccatctccaaccagtatctccagggagcgctgggagccacagtccctgaagagactgggagggtggttgggtggccctgaacttgggggtgcacagttagtgtccccactggctggcaagcaggctggaaagaagcctgaggccagaaaggcttccaggggacatggccccagaagactggggaatcagagagacagtcctcgggggtgtcggccgatgacagaggataaaagatgaaagatggagcccggcacctgcccgcgttgtgccagccaacactgtccctgcccctccactggcccataggccaccagctggcccattgtccccagtgagagagcagacactggagggggctcccttgtgggcaggggctcactcatgtacgcctgcctggcagggactgccagggcagagccaccccgggctcaggggcgaggaggaaagaagtgggggtggccaagagacagagcgtggagactgagtgggaggcccggccagagtccgggaggctgccctccaccttcagagtggagaacagagccctgctgtgctgcagtcaggtcccctcctgtggtgttggcagtgggcagtgtgcggggcctgcgaacaggagataaagaattcaggcagagtgttttttctcactaaccgtggatttgtgtatttgttcagctggtggctctgataagccccattctgccagataaaagcagagcagccacgaggcagggcctggggaggggcatcctaaaggggccttcctcctttctgtcccaaatcccagggttatcccctcccccggggaagcccagacagggaaggcagtcacgacatggagatgctctgcagctcctgtcacctgtccagagcaggtgtagacctcaaggcaaggctccccaaagagcctgccaggtaagaaagctggcccacgttgtgcctctggtgggcaggacgtctccttgcctccccaggagctgcctccccaggagccctttcaccatggacctagtggcctctctgggccctgcagccactggctggttcctgccagcctccttcctctatctatccaaggcacatccccgagctgacagggtgctcagagaccttcccccgtcacatccctggtgtcccgaggtgcctgcggccctatcggggcaggggtctactcttgctgagctagttaaggccctggctagagatggcctgtgaggactttagccacctttgagtagagctgcggtgtcccctgcccctggcttcagccttccctgctcctttcactgtgctggccagcggggagaaggagaacaccacttgagcagatcagtggggccctggctgcagctgccccggccgcaggcctggctcctgtgcctctgagcctgggtccagatttcccatgtctctgccttttgtcctggagctgagctgagcatgtcaggggccggcggtcgcggcattgtgggcctccggctgaggccgccagccgtaagatggctgccaaggtctaaaatggctgccagcagcgcccggagcagcgcccggaggcgcgtggcaggggctgcactcgcaccggatccttgctcccacttgctcctttacacagagctaatagtaataacagcaataacgttttggggctgtgtcctgatttagaaggatttcctgtctgtcgcgctctcctggagccctatttgtctctgcctcagtcgctggcccacctccatctctttgtcgggttccctctcggctgtccctgggctgggtacgcgcatgcgcatccacacgcgtgtgcacgggcacatgacttgccatctccacttggtctttcgcagtgggtaggggccgctcccatggggtggactgtgaagcttcctccttcttcccctgattccactgatccagctctggagggcttggtggggaccaagttgtccctaggatgagtggggttcatagcagagagacccctgggcagcagagtggggaccacgtgaccctcgctgagctctgcacatgggtcctgaggttgtgcccttcctgagccatgatttagagcaaccacaggactggggtctgaggaggccctggggtgggctgcctgctccgtagacctcttggctgtcactcccggactggctggggctcaaatcagacccagaaacccagcaatgggccaaggtgaaagagtgaggtagtatcaagaaagttcacattcacaccatgctatggcacagagaggctgccctctcagggaacatgggtaggcttcctccagagcagagagtgccactaacaaagagatggctcagggtgggaacctcttttgccaaacacaccaccagggctgagcgaaaggggaggtatggaaggatacaccccaaaccagaggtggtgaagtatatccttccatattaaaagcacttgttagcactttccgtattaaaaagaactactttttcttgactcgctacaatagtatttattttttggaattaaaaaatcaaaagttaagtggggatggggtggaggggaagtggagcctgaaacagtcacccttttttacccattacactaaggcaggcagcctggagcatggccagtgctttcagccccagacatggtggggccctcatgctgcaagcaggggtgccacccgggtgggctgcatcctgccctccagccccagaacccagctctgttccttgcctcccaagtgactgatggggtccctcaccccaaccctagggctgatgtcaccttttgtgaacctcctttatggtgggggccagcaggttgaatcagggtggtggcgagacccaggaggcaggaatgctctttaaagtcgggcaaagccctggccaataccaaggcacgtttttcagatgccacccccatgtggtccccctgtgagcagctgattcttcaccaaatgcctggcttcctcctgccccacaacctgcctggcccccctccaccaccctctcgccagctgtcatgcccaggcaggcattctggaggtccccgttgtgcccctggcacacaaagctttgaggaccagggggaccagggtggggggctttcccaagctcagcaaaatattcacacacacactccaccctgcccccagccctctgtgagctcccactgcacaatgagcccttgtctcggggctccctctgagcagctgtggcaccggggcatgagacagcccagacaggctggcacagagcgggcgacagcgtcagggcagacctcccccctctgggttgccaggcactgcctctgagcataaaggtgaggtgggggaggcgcaggcagacaggaatggcttcaattaaccaagttagggaaggggatgctcctctgggagctggagctgggtgggggatgggggacccttgggtctgtccccgctgtggagagagatggtctctgacttctctcttgggacccctctttgctcctgactcttggccggtgcttcttacctgagggtgactttgcccttaagggcacagtggacaatgtcttgggacagtttgggttgtcacaactggggtgctactgtcatctagtgggtggaggccagggatgctgctcagataccccacagtgcacaggatggtccccaccagagagagcaatccaggccaaatgtcagcagtgctgaggctgagaaacctgcactgggcctgtctttccttctctgctttgggtctcccggagcctcctggggctggtttggggagagggtggggtgaaggtttctgtagccagggtgggccgtccctgctcttgcaccaggctggaggggccaatgcttggctggtgcttatggggaactttgctcctgatacattctccccttttgtgtctcctgcagaatccggacaatcagatagttcaaaccagcaaggagatgcggacatcaaaccactgcccaacggtcagtgccccccacctgcccagctgcccttatccttcatgcccctccacttccttcccccaccctggctgccctggccaccctcacttcttccccttcattcagctgtcccttgactgagcttagcttgctgtcctgaggggatgggggcacacctagaggatcccccctgttcggtgtagacctgagggctagcctggagctggaaacgggacttgggagggagaagcaacagtgtggaagacctttggaaatagccaggcagcccccttctggccttgtcttgactcactcatcctttcccctcttcagggcacttaagtttccaggactgttttgtgacttccggggtctggaatgtgacggagctggtgagagtatcacagagtaagtgagtccttccttccaggccagggatggggattgaaagtgaggaggtgggacctcatgggatgtcctcctaatggggtcttagggcaggtggatgggaacagatgctttctgggacactctcggcttcactggtgctgggctgggtacaatagagtcttccagagaggcctgtctccagtctccattgctttggaggaaaaagaaaaagtcacaaccaaaggctcttctgtgacccactagctgggaggaggttcctcagcagcccagatggcccactttctcccatctcctggccccacagtaaactcaccctgggcttctgggaagctgttcatgacaaagaaacagaccccatcaggcctccccccacctccaaacctcatcaccctctcgttcttcccagctcctgttgcaacagcatcagggcccaacttctccctggcggacctggagagtcccagctactacaacatcaaccaggtgaccctggggcggcggtccatcacctcccctccttccaccaggtaagcccagtggccctgcctttccatcttctctccactccccccagggccagggccgtcccagtggctatagtcagctgtgtcactgaggctagggtgcttcagaatgtcacctctctcattgagggcactggctctaacactttagagtccaccatgcgcagtcacccactgagctgctttgtgctgtcatgaaggacccagccctggggacacaaactcgcacaaggcatcgctttgcctggaagtgggagtccaagaaggtctctgtcttggggaggtgacatttgagcccagacacagagggggttgttggggggtatggggaaaatgttccaggagaagagggtagcctgtatcccagttcagcctgcacaggctggcggggcaccctgcagagggctttggaggccagaagaaggcatttagacttcatccctgggtagtggggacccctgaggggttttaagcaggggatgctgagggtgtgtgttccagaaagctctctccagcaacagtgtgtgtgggcgggactgatagccagttaggaggccattggaaaggctagagtgggggagggcctggagggtggggtggatggagagggagggagctgcttgggaggcagggatgtgggttctggccagggcaagttgtgctgggcagggtccactccactttttttttttttttaaaacgggtgtttatattaattgcgagatttttggcattcattttgattttttaaaaatatgggactaggccaggctcggtggctcacgcctgtaatcccagcactttgggaggccgagatgggcggatcacgaggtcaggagattgagaccatcctggctaacacggtgaaaccccatctctactaaaaaatacaaaaaattagccaggcgtggtggtgggcacctgtagtcccagctacttgggaggctgaggcaggagaaaggtgtgaacccaggaggcggagcttgcagtgagctgagatcacgccactgcactccagcctgggtgacagagcgagactccatctaaaaaaaaaaaaaaaaaaaaaggaactaaaatattctttatattgatgactgagttttatggcatttttgtccccctgacatttttgtccctctgacatttttgtccctgtgagtacgtcattcacctcaccctagccctgggggctgccaggaaatcataggtgggatacaggaggcagctgagggttttgccgacttctctgatgtgggcagcttggaggaccgtggcatcacagattgggaaggggcttgaggaagaggagcaggttgaagctgatggcttgaggggccctagggctgatcttggggttgggcacgcagtgagtgcccagaaatgctgctgtcggccggcaccactccccacccagagggccatctatgcacagttctttagcctggactcttggtcactccctggagcctcagcccatccttggcccatgtgaccctttctttcttccccagcaccaccaagcgccccaagtccatcgatgacagtgagatggagagccctgttgatgacgtgttctatcccgggacaggccgttccccagcagctggcagcagccagtccagcgggtggcccaacgatgtggatgcaggtatgggtgcgggggatcctgacccagagcaagggcagcccagagtctttttgtccccttctcagttcacctggtgagcctcccaccagttgtccccctgtcggggggcattacccatctgttttcttgcctcctgatcttccagggagggcagagcaggctgaaggaagggagtggaggtgagggtgaggaggggtgctgtgagagtcagcagcagagcccgtggtatggcggtgggaagcagagggggtgccaagcctctggtgccccacagtgggatggccgcagcccctcctggtatttctctagaggttgccccaccccgtggcctcatggttgaaagcagtttctcaccctgggggctcatcattctgtgtaggggattgttctgtgcatggcaggatgtttagcagcatccctggcctccacctacaagatgccagcagcaaaacccccacccccagttttgatgaccaaaaacgcctccagacattgtcagacgttccctagtgggatggaatcctcccaggatgagaaccactggtctcaagggcccagcttcacagagagaggctcagagtctagtgaagaatgagcagagtccttttgagaccaggtagggaagctagcgaaggggagagagtacagaggaagccagctcagaccttcccagtctcctctagggatcttcttcttgttgaacccaccccccttcacctccattcttgactgagggtgcagacagacctagagaggactctggaagacagcatgtaacacgtgcgtgtgtgtgtgtgcatgtgcatgagcacatgtgtgtgaggaggctggccgcaagagtcccccgctgacgtgccagtggtacagcccgtgtttatcctcactgtgggtgtgacagggcctgggagtgcagactcacgcgtgtgggttgtgcacagggcatggctgctctggacaggcctgggccctgggcatcattctcctcctccaaaaggtgagggtctgacctaatggtactttgtctgatgttttccagatatgcccctactgggaagggccaagtgggcaggcagagtctggggtggagcgaggtggggctgggaagcactcctgcttttctgctgccccagaacgaatgcaagttctggcagcttctcctcctcctgggaggaggaaaggagggctcgcctccaggcctcaggctgagggagtgggctggagaccctctagatggccagcagaggctggcctctgtgagaaggcttccttgcgtgactctggggcccctcccaggctctcctcgtggcaggcagggacttgggccagcatgggccacatgcttccctaggggagccttgagaggcagagagaggagttgagaaggcccgggagactcttgggctacatcctgggtccctggccggggcctcagtaggtgaccccttctgcaaggactgcccctggggtgcatagaggactgtgtctgcagctggctcctggggcaagggctcctgggctcctgtgcccagacctaattcctgaggagcccccctcttcctggctcctgctctctcctttcttggctgtctgcttttgcgcctgccatttctgcatttctgctccttccggcagtcctgccacgcacggcccctcaacatcctcctgcagcaccctccggctcccttttcccctcaccccgctgtgtgttgttttcatgggctgcaacaaattgccaattaagcagcccagctgcaggacagggaacagctggggaggcactgtgcggccatggggacagctgtgcacagctggtaggatgctcccccctccccactgtgccagctatcaggtggcacacagctgctgccagataacacctccgctggcggctgggagttcgcccttcccccgccccttccctctgcagttaagatggctctttatttctctgttctgcagcccctccacccctcacccaaactgacttgatttgtcctccaagggtggcagctgtgagatctgccccaactctaccttatccttcccagcctgggcacaaccttaaagctcagcccaagatgggagctgatctttccagaagaacctggccccctgggggccctgctttgtcatttggatgctatggccactgggcagagatgaatttctaaagacagacttcaaacaaggtgttctctgtgcccttgtttcatgctgaatgccacccacacctctggcaccagaagcagggcagagccctgaaattatccatcctatggcagctgagcttctgggtcccctggctgggggagtcttctcccctctggctctgcctgcacagcccggctaggcctgagcagcccaaggactctccaggtcctctggcctctgtccctgctctctcgctgggcattgtgtccctcctgagggctcatggctgtgtgctcccttccctaaacggggccctggcttcttcccaccagaacctcccatggccccgggcaccatggcatagaccccagcctgtccctcccaaacttaccccttcccggctctcaagctggcgccctggggttcctcctgcactcctttcccaatgttggtcctgcatcccaccctttcacttcattacctgcttgccagggcataggctggggcccttgctcaccccctgcctggcacacaccaccccacattacccaggggcctcgttttcctctctggttagaagcaccccttggctggcctacacacagggcctcggaaccaggcctagaacaaggcctgggactgggcaaggagcagcaggagggagcacagtggaggaaggggcagtggggaggggctgaggagagaaggagcgagctgctggcttcccgccttccccgcacccaccccagcccagctaaacctgccctgtgttgctgcttcctccccccaggcccggcttctctaaagaagtcaggaaagctggacttctgcagtgccctctcctctcagggcagctccccgcgcatggctttcacccaccacccgctgcctgtgcttgctggagtcagaccaggtgagaaatggggggccccggaggggggcagttggggaggtggctgagtatctaggggcagctggccaggtgaaggggccagagctgaccccgagtgacagccccacgctctccaagtgggccaaggtgcagcagcgggtgggcatgggagccggcccctgcttcacgtagcacctcatcgaggaccaggccgggcccctgggctgcccacctggctcctgagcaacctcccacttctcactcctcacgtgcatgggtgctacatacaacacaagcctgtcccgagtcctccccaactctggcccagttctccttttgtcctgccagctgtgagcgggaaggcacagccttctgctctgccttcctgccggctcctctctcccagctcctggctgagcccaggctctggatttttgccagcatgagcccaggttgatgtggggcctggatggagaagagtactcctaaggagcccaggctcctgcggcaagtagctaccttgtctgggcctccctgccgctttctagaaaggaagggctgggtctaggggacaggtggtacctgggctgctccccaggaaaaggaactgcccactgccgtggggctgctctctgacttcagtgtcccagttgagaaggtgctcaggatgagaacacctagatcgccctgaggagataggatcaggcaggaggctgtgggagctgagacctcagccctgtcactccttcactttcttcttccctctctgggcacccacctggcagcaagaggcctggactttttctggatatggccctatgtccgcctgccatctcctgggctcgtatgtaggacacagaaaatgaggaggtttacctcctggcttcctccttggggcctcctggctgggagcccagaggcagccggtgctggggcagggtgtggtggccgcgaggtgggggtggggagcccaggccctctacacaggcagcaggagggcgcaggcctggctcctccggctccacctcagcttttatgaactccagagagaagccaagtttcctcagccccctaatgaaaccgagagcaagagcgagctgattggaaacagacgggaggaggaagagctggggcctgctctgggttgggaattgcgtgtgcaaggacgcgtatgtgaggacacgtgtgtgagtgatgaggctgagcacatgagaacaccgcctaggtggcggtggctgggtgcacaccagctcgcactcaggagatgtgtgtgcatatgtcagacggccatcctgagcagatgctggctttgtcttcatccagagccccagggaaccctctgcctcctcttgtcccccacccagtctcccacccagggcctgaattaaggcagggctagtgaggcactcaccttaggtgcagagtgtcagcaagtatcaaaaactcagtcatcaagataaataatattttaatggaatatgttttaaaatccaaactattgcaaaaaaaagggtatggtaagcaaacaccagtttttttgtttgtttttctttttcttttttcaaagacagtttcctgctctattactcaggctgaatgcagtggcacgattatagctcactgaagccttgaactcccagactcaagtgatccctcctgtgtgccaccctggctaatttttaaatgtttgttgtagagacggggtcttgttatgtttcccaggctgacctccaactcctggatcaagtgatcctcccaccttggcctcccaaagcactgggattacaggtatgagccacagcactcagccatgtctttgtttaaaatggtttaaaatgttgaggctgggcacagtggctcatgcttgtaatccctgtactttgggaggccaaggcaggaagactgcttgaggccaggagttcgaggctgcagcgagctgtgatcatgccactgcactacagcctggatgacagggcgagatcctgtctctatttaacagatactggctgggcgcggtgtctcacgcctgtaatcccagcactttgggaggctgaggtgggcggatcacaaggtcaggagatcgagaccattctggctaacacggtgaaaccctgtctctactaaaaatacaaaaaattagccgggcgtggtggtgggcgcctgtagtcccagctactcgggaggctgaggcaggagaatggcgtgaacccgggaggcagagcttgcagtgagctgagatcgcaccactgcactccagcctgggtgagagagcgagactcagtctcaaaaaaaaaaattctttaggctgggcacagtggctcatgcctgtaatcccagcactttgggaggccaaggcaggcagatcacttgagcccaggagtttgagattaaccaggacaatatggcaaaatctcatctctagaaaaaaaaaaaagcaaaaatctaccaggcctggtggcgtgcacctgtagtgctggttacttggggggctgaggtgggaggattgcatgagcccaggaggattgcttgccgtgatccgtgtttgtgccactgcactccagtctggatgacagagcgagaccctgtctcaaataataataataacacttttttaaaaagccaaataaaataaagacaagatcctaccctgcctcatctgcctcatcctaatctcccagcgctggttgtgatcaaactttatttacaaaaacaaatggctggcctttggaccctagtttgcctatttgattattattattattattatttttgtattgcattaaaacatcatggatcctgatgactgacttttttgtgccgccttaacttttgtgcctgtggcggctgccttacctgctcaggatcctcaggaccctctgaccggcagctcccctcctctcctgtccctcccactggctgcctccttggccctgacgcccttttttccctgcccacgtgcatgcagggagcccccgggccacagcatcagccctgcacttcccctccacgtccatcatccagcagtcgagcccgtatttcacgcacccgaccatccgctaccaccaccaccacgggcaggactcactgaaggagtttgtgcagtttgtgtgctcggatggctcgggccaggccaccggacaggtgagtccagagggccccaggagcccggctacagcctcatctccacatctatctgtctgtctcagggctcacagggagagggcccaaaagccaggagcccacctggggctggagcagcagggagctggtagtaccaaacgcctcgattttctgggtctggggacgggggtctgtgtattatgccagggcttgtctatcatggtccggagaggtgggggcagcatctgggcccccttgctcagtcaggctccttgcctttcccatggtccttgccccctcagcaggagtgaactcatgatgatccaacccggatctgggccctgacctcccagcgctcctcttaaacctcggggctgcaaggatttgctagattctagaccagggtttccccagtatcagcactgttgacatttggggctgtttattcactattgtgtgagaccatccagtgctctgtaggatgttgagcaatatccctggcctccacctgctagatgccaggagcacctcctcctccccagtcttgataataaaaaaaagtctccagatttcagtgtgcccaggaggggaagaccatccctagtgaggagcactgtgtcaagggaaagccccgatccacatagctgccacggagactcctgctggcaggacttttaacaaagggttcccaggacggtcctggttctagagtgaaaccctgctgctcctcagccctgggagacacactggctccccccagagcccttctctgtcactgacagaaactcagggttgctcagcgaaagaatgatcccaggaggtggtgggccagagatgacccttcagtgggacaacggtccctggttggaatgtggaggtttctagacctctgggaaaaatccagagcctcagcagcatgctgtaataggagaagctctagctcctctgtagccagccctcccagcttggaagcctgctgcgagaggtcaggcagggaggatgctcaaagggctgtggtggggaaaggcatcccggaagcccacaccagaggctgcctgctgccaccagccccgtgctgccttggtgtgctctggcagagcgagcatttgctaagtgctggtgtattgatttgcggcggggccgtggctccgcctcctcactctgtccctaagggaagccagtcctcttccctccctcctgttcccctcctgctcctttcctcctcgtctcccttctccctttgcccatcgagggtttctcttggctgactctgcagctccttagcatactggtagcttcgcccacctctctctggacaagctctgtccacttttagggccatggagggaagagcagacctgacctctgacagctgctgtgcttgcatcagagatgccagcagagttcacggggagctaccagcctatgcccagcccccaaggggcctggggtctgggatatgccgcagagaggcctggaacattaccttacctgctttcttaactaccgaggcagccaggatttggagtcaaattcaggctggcctagagaccggccaaggttaggccaaggagccaaacctaaccacagaacccttgagaaagtgggtcatttagtcccctggccattctgagcctctggtcctgagggctgggtcctgagcctctcccttgacttgactgttcaagattgaggactctgatatagagccatagtttttaaaaaaacgacagaggactcattttgcctagaagcttctcttcctgaggcaggcacttgctccaagcagaccatggacaaaacaccgcaaacaggcaccttgattaagcaaggagtgtggcccagctggggagcaacttctgagtttccttgtgtggcctgtgtggcctgttgtactgaagagagggagagggggctcagcggggagcctgcttgatggagcccacgcccggcttctgggaggaggctagagacagcactgtgctacacaagaggctgatgcatagctgcagagagccagagggcccggctccgccactgatccagtgggtagggagtggcagcgcccagctgtgcttgcactacagccactgttaagcagtgcttctcagacttggcatgcgcgagagtcaactagagccctggctaacacacagatggctgtgcctcacccccagagcatctgatgcagcaggtctggggtggggactaagaattagcatttttcccaactttctaggtgatgctgatgctgtttctaacctccttgagaatcagaagtcacagatcagttttgcaggaaaatgtctgcatagaagaattttaggctgggcgtggtggctcacacctgtaatcctagcactttgggaggctgaggcaggcagatgattgcctgagctcaggagttcgagaccagcctgggcaacacggtaaaacccctctctactaaaatacaaaaaattagctggacgtggtggcgtgtgcctgtagtcccagctacttgggaggctgaggcagaagaatcgcttgaacccgggaggcagaggttgcagtgagccaagattgcgccactgcactccagtctgggcgacagagtgagactctgtgtacaaaacaaaaacaaaaacaaaaaaaacccagaattttatagacaattgcagaagggttcccagggcacacctatagccatggccttggaccctagggtaataacagccaaggccatgtggagacactatgcagaggagatgcaaagggcagttaagaggatgcctggttagctgtgtttcagggagaaggaagagactgccaagtgaacatgatggagaaatcacagggcccaatgggagagcatgactccgggaggcaggatgcctggtcctggctcagtcttaccatcattgtctgaacagccaggcccacgtgtttatctgtaaggtgaaagtgaggagctggtcgggcgcggtggcttatacctgtaatcccagcactttgggaggctgaggtgggcggatcatctgaggttgggagttcgagaccagcctgaccaacatggagaaaccccgtctctactaaaaatacaaaaattagccgggcatgatggtgggtgcctgtaatcccagctacttgggaggctgaggcaggagaatcgcttgaacccgggaggcggaggttgcagtgagccgagattgcgccactgcactccagcctgggcgacagagtgagactccatctcaaaaaaaaaaaaaaaaaaaaaattgaggagctataccaccttccaggctccttctagctcctaactcctgaggttttaaggcactgcacagtcacaagaccttgaggtttttaaaacctcaactgtaccccagtcagagctgagacatgccagcctggttggaagttacatctagaaactgaatgttgtaaatcagcaggtttcaatgtctggccatatcaggcggggattagcattattgggtgggattaacgatttagatactcctcggggagacaggctctgaagctggaggaaggcagaggccgtcctgtggttgcttggaaggcctctgtgtcccagtcccctgggagcctgagctcgggacacctggagaggaggagtgaggctgtgatcagaccgtcccattccctccttctaggcaggcatggagatgaggggaggcgtcgcatcacctttctctgcagcgctgcaaacccccacgctctgacctgcactgttacctggaactgagggtccctttccaaaacacctgcacaaaagttctccagcccttgacacatatggggaccagcagccactgtttgcttttgtcaagggccactgagagttgtcacccttggagtgggcaggaatgggtcaaaggaaccatttagagggacagtgtgtcagacctagatgctggtcatcgtggtaaaaaaacagtgggcagagaagccagagttcagaagggcgtggctgcacaggccagcctgggcttccgtgactttaaagtgcagcaggaaggacaagtcgatcccacgtgcttagtggtacttgagtgctgcatgcttctgccgacttgttggggagctggcagggatgggggagtggcctgttttgaaggttccagtgagatcaagaatgtcctagagaaacagggcagagaaagataggttgtgattcaggggatctggctggtccccacagaggggacagcgttttttgagcaggtcttgaagggtgtgggaaatagtctttcatacagagagcttcgcagcaagccagcgtgcagtcctgcctgctcggcctgtgttccggaaaccccagtcagtttggaatgggaagtgcagaggggcggtaggggctggaccagtagaggcatccgtgggggccttgaatgcccaactgaggagattggacttcatgttgggtatagctggggccgtggaaggtttcagaggactggagaaacctgagctgatgtggatttgggggagaggattgatgagcctggtggaaagaatcctagcatccctggagtagtcaggcagacatggctgtgaattccaggtctggccagttgcagctgggtgacttaggataaaccatttaatggcccagagcctcagtttcctcagttgtgaaataaagagaatagagcttcctttgtggcaaggcttcccagggcaggcctgttaatgcttggactgatgatcctttgttgttggggctgtcctgtgcaccgcaggatgtcgaggagcatcctggcctccacccagcccctccagcctctttgttgtgacaactgaaagtgtctccagacattgccagtgtctccttgagggggacagaattacccctgggtgagaactgatgctttctggggtgggtcaggggttacacaacagaactaaagcacctggtccagggctggacactgagggtcctgagctgataagcacagtctcagcacaggggagccccatacaccagctcattgtcatcgtccagctgaaatctgtgaggacagaacgaggcactggctggagacatcaaggggatgggctcctcagggcttgctcaccgataggaggaggagcacacagcatcctctctgggtctcgcatccgggtgcccggaagggcggaactctatcccacaggagaggtgctggtttaggatgaagagcgcaggccaggccttcctgagcccacgctgcagtggtcatcagggtcctgttcagagcagcaggaggtgtgtgcccaaacctccagggaggtctctccaaggaacctgcctgggagaggcaggggcgcctctgtctgtcctttggcacctgtgtgtcctgaagccagaaggccaacccacgcaaggccatgcacagggcctggaggagaaaatccagttagaagcaaatgagggcataaaggacaaggaatgcatcctggcagccgagcatccatggcgtctgagggcgttgtacagggaagtcctcctgaagaacctcacgggcactagagctggcagcgatggattttcttccctggccattcttgagagaacaggtcagcaccctaccacccacaggcagtgaggacccaggctgctggagccgaggacgagctccccaacttctggtggcctcctgaggacatgttgtggggtgggtgctggcaggcctgccgtccttggttaggtgaaccagctcagcccgacagccctcagagggaggcaggcatgtgctttggggagccgggggagcagggtgagcgcgctcatctttcctgctgtaggagatggtcttcaggagtgtgagagttctaggtacagctgcacgtatttgctaggtggcacattttggtacctaaaacattttccctaagaagtaacaaaccacccgtcgaacaccccctccctccctcccacaacttcaaaagaggaccaaaaaaaaaaaaaaaaaaaaaaaagagaaacacctgagagaccaaatagaggccttacaccctcacccatcctgtgccctggaggagaggacccaatcctggatcttccaccgggagcgcccgctctcaggagcgagctggcgcggccgcgcaggggagcgtgtgtctgtgtgtgatgtgccttcatgcgtcactctatttatgttgttcgcagcccaacggtagcggccagggcaaagtcccggggtcatttttgctaccgccgccgcctccagtggccagacctgtgccccttcctatgcctgattccaaatccaccagcactgccccagacggcgccgccttgactcctccatcaccttgtaagtggacgatgaaaccgaaaccacaacgcccagcgtccccggcccgtccaaacagtctccactgcaaaaagaaaagccttccccctccccaccaccaaagccccccaacccagagcaccatggacaagagcagagccgagccccccaaccacagcctccctcccgggcctcagtcgcaccagccagcaccccacgagccccctgcccgctgctcccagccggggcccctggcccaggcccctctggggggcgggagggagagcacagctggggcgcgcaggccaggggtgctggcgggggtgggagggggcggggaggcacagccatgccatcttcatgcctgattgctgtttttttttttttgttttttgtttttgttttttaatttttttgttgtttcgttgttccccccacaccaagaaaatcaaatgtaaccacaaggcgacgccaccaccatcccctttttgccttgcccctcacctccatccctgggcccttgggcctcaaagacgcagcaggccagcccgaccccttccccctcagtctcacatttggtttctcgttgttcctctttttttttcccccccttccatccctctcccgtcccttctccgcaattcctttcccaggttagatgttccaaggacgagggagggctgtgggctttggcttacttcatctctctctctgtctctctttcttttcttttcttttctttttttttcctcttaaaccaatgacaaattttgtcaaagggaaaagaagaaaaatcattcgagaggtcccaggtagacccggcgtgaaggacaggaggatggggcgggtgctgtctgtgggccagggtgggcagctctgggggtgggcaggccacaggccagggcagttcggtggcggtgggaggggtggcccatctcacactgctctccgctcgctttgtctctcctcctttctcgtggtttgagttcttttcccctctccatcctcttcatgccatcttcccatctgcatccaccataagacatgaagtcacagtcattggaggtgggcagggtgggggatgggagctgggctacagggttcgggggccacttctggagagaggtgggcagaatctggtgagcatggagtccctgggtgtgtctggtgcagggcagcggcgggccttccaggtaacctgtgacactccttgcctcctctgggggcatcttcccttctgggggtgcagggcctgttccctccagcagggctccatctggacaacctgagaggaactcagggctgttgagatcattttgtctttgggccccaggatggctgctcccaggcatctgagccctagggctctgccaggctctccagcctcctcctcctctattgccttggtcctggaaccacaggcctgttggacctggtgcatcagtcagaggaggagaatgccataggcctgagccttgccaccccctgggcccaagccaggcagccagctcctaggcccttctctgaccctgccctacctggctcagacctccattgggcaccctttgggttccccaagcctgcctgcctggtccttgggcctgcccagagtggtaagaggtgtagcatctagctaggccacccaggttggagaggtagcctggctgggaaggccttcccgaagcagggtggggccggactgccaaagcctccaccctcccctggccccctctcttcagtacctgagaggggccagtgggaaagcagggttatccactgagggtacctggggaccagggctatccccagccctgcccagtgcctcactagcgggtggaactgggtccaggagacttgtctcagcctccagggcctctccctcatcccagctgtgaaaaaggatgcctggctgagactgtggcttctgagtgggtgtgtgtcgggggtgtagtgtgtgttcctggtcagtgagaggatgagggtgtccctctgtagtggggggcaggctcggagcctggccttcagctcagatgcccctctggcccatccttcccactgccagcctaaactcgggcagcatggtctaactcagtctctccctctctcagcagccccgaggggcagtgcccaggtgggccccaaggcctgacagggtctctccctctctcccctgctccccacagcattcgcaacgacaggcgcctcctctgccaaccggtttgtcagcatcggaccccgggacggcaactttctgaacatcccacagcagtctcaggtaggagaccctgcccaccacctggatgcagggaccaggggagtagtcagggttggggggcatcttggtgttagggaagagcctggagtccttggggctaacagggagagagaggtctgaggtggggctggagggcccaggcttttgcacgcccagctgagcctgtctccccaggcagcccccaggctccctggctaatcagctaattggataattagctctgacagccctggccctggggaaggcggccaaggacccaagtctagaggccctctgggccaggcctggtagaagcaaagatggaagcctgaggcccatcgggaggagaatagagtctgcctcactgctttcacctgccccgactggaagccccggcccctagccctcccctttcccctggcgttgggtgggctgggtgacgggtggaggagggacagagggcctggtgggctgcgtgcccagaactggcactgagggcagggcagggcaggccgccaccctagaggcccctcacccaagtctccaggagtcctgttagggagaaggccagcatgctggagacctcatccttgctcctatcccctgctgacaccacccttagttctcaccaggagacagatccccgtcacaagcagggcataagactactcttagccctccaggtggagaccccagaggccagtgcccacagagcccagtgcccttgggggcacagggaagacccatctcaggaggaggacagaggcagctttagggggcctgaggcttttaccacccagggttttgaaaaagaacatgcaaagatctttcttttgcacattttacaaaaacaccaccttggaggtgtcctcagcccggggaaatccacctctctcaagagcccctggggccacctctcatctcctgctctgcctctgttctggggcctgagtccagagaaagttggtggatggaagttgtgtgtgtggtttgagattgtttttttttttttcttttcctttccttccctcaaaaaaaaaaaaaaaaaaaagccaaaaaactttgtcaaacttcaaacttcagagctccctagtggcaaggaggggaggggaagagaacttcaaccccctccagcttcccaccccctttccccagagtcacgtctgacccgtctggtttccaggagcaaccagacatgatgtaacacccagatgaacttgaacttgggggtgctgagaagaaaaacaatggctccgagcaggggctggagccagccccctctgctctgtgccagggaggccgagagagccctgctggcagaggcgggagggggtgcgagaggaagggacagcaggcgggcctcccctcccagctctgggctggcaccaggcttcagggttccatcgctccctccctcctgctgcctgcctgggctgctcacagctctgcggtcgtgcgctccgaggaccactgccacgagccgtccctgctaaccctgtttccgctgcctcctttactttctttgctcactttgcttggacgtttgggggccaagtcagagtttagggaaagtttgtctccccccatgttccctgtgtcttaggctccaggaggtaggaggaaggagtcccagcgggggtccagggcccctgagcaggcaggtgtgtctgggagtggttgggggagcggaagctggacaagcggagctggagccctcgggcctgggggcaggcaggcggctgcaacgggcgggcgcagggggtacagccgggggtggtttccacagtaaccagtgactttagctgatctctggagcaccagatggagagagaacaatagaatgagggaagaaaagagaattttagcaattttgtcattccctgggcagcgctttttacttagttttaatcaattttggacctggctcaggaagtagggaggggtgagcagagaaagccactctgtgcttggcagcagatcccccatttctgggacctgtggggaggtgccggggagcccccttggggcagcctttgtccctaactccagacctggaaccagagtcttccttccctgaggaggaccccccagtctgagcattggcagttgtccccaactgtacagctcaggagaccccaaaggggccagtgtgaggccctggcatgatctgccaggagcagatagggcaggtggggccctccctgtcctattgtccacaagcctcatttgcctggtgaggagaggggtgggcttaccaccagagtcagcctccccctcaacctcggggcaatggcacagggttcctgtatagtctccccttgggaagggggtcccagggaacaggcccaagcctgtggcaggtgggggtcacccagcccaggcgcttcccacccccgggcctgggccagaagcccaggagctggctgcgggccggttctcccccacccactctggggatgcctcaggcctgggtttccgccttagcctcgccaggccccaatgagcctctgtttggcctgtagtcaattgaccggttggacttggggcaggtgctcgaggagccccactgagggagggcaggtctcttgtgcgtactgtccagcacatacaggaaatttagcatttctgcccacccagcagcgcctgctcattgtggcaatcccaaaccgccacatttccagatgctcttgatctgcactgtccattgtggtagccacgggccacgtgtggctgtttacatttaaattattaactaaagaaaaatttagttcctcagttacagtagccacatttcaagtgcttagaaaccacttgtggctagtggctactgcaatggaaatgagaacatttccattgtcacagaaagtgctagatgatctccaaggccctttctgaaactcagtgtccctatcctcagtcccaaaccagagcctgagagcaggtctggcctgcaggcagaatgtttgaccaaagcaatgttttaaatattggaaattttcacacgaaattctgtttgggcttctggcttcttttgaaaagttggcagatgagctgccctgggccctcaccctgaccctaggcagggcacaggcattctggccaccacagaccctgcttcctcgtgctcgcagcacaggcagcagttaggagcacagcctgcactgccccttacatttgaaccctggctctgttgcccgagggctgtgtggcctcaggcaggtcacgtaccccctctgtgcctagcttcctggtggggtcagggcaggggtggagtgaaccaggacctggtatgtgctctgtagttggctccgcctggcccctgcagaccagagtctgtgacagcctgggagaggtcccaagatgcattttcagggaccctcattttgccccaacggtactaccaggtgcacccaggcccagtagaccacagtagaccctgacccaccactttgccaggaggtggggctggagccttggatggagggcgtagccaagcagcccagacccttggggtctgccctgggtgtgctctgagctgagccaccagacacaggcagacaagacaaggccctgtctgtgggaaggcagcgccccctgctggcgatatgaaggaaatgacgctcaccccagggagcctcaagtccttcctcaatgtctggtgccctgagggtagaggatccagcaccatgggctacgtggcccctcccccaggcctggcgctactagggactgaagctgtgtggttcccctgcccccagtctttcagcctgtgggaccttggctggggtatatagatgggaatttctgcttttaatccaaagagacagaaagaaaactcagcaagaagctgggccacccccaacccattcctaaaacccctctgggtacaaaagccccagcctggcatcttccccaccctccaggacccacacaaaaacctaaacaattggaaacatggccagatctcaggcctgtgccagcgccagccatgggggtcccacccgctgggcacagtgcccacgggaaggccagctggactctagcactaggggcagagtctctgagggggcggggttctcgcaggagggagggagagaatggggatgccctttcttctccatgggaacaaggtgggtggtggctgcccggcaccctggctctttgggagctggacccttgaggggccaggtcactgggccaggtaggagtgagatgggacctgccccagctgttctcagtatcgcctctttttcatcctgtttcagtcctggttcctctgataagatcgacaaaagaaacaacaaaatgagaagaagaggttcctcgaaaggggggagaagaaattttgagaatggaaaaatcccccagcccagcccagccccaccgaaaagcaaaaattacacgtcgtcagccactcagcccttctctcctccagcccggggacccccgcgggccccagaagcagcccagttctcagagagcccttggaaggggtctcggtggagctgtgcaccagcagccaagcagaaagaaacacgcgacatggactctgtcaagtagaggacagaaagcaagaaaggatgcagaactgccttcctccccctgaccccgccccggccttctggggaaggaacaaagtccccaaacaaagcaaccagcacaattctgaaggggcctggcctccaccctcaccccttcctaggggaaccccaccctccacacagccggagctgccctagggagcctggagggccagcttgtaaagatgatggggtttagatccctcaggctctcccctccagactccgcccttccctccctccctccctccctccctctctgccaaggctccagcttcttcccccagctgctcccgaccaggagggggagagcagcctccacttaccccaccccacccttgggctaaaagcccccaggcgggcagggggtgacccctggagctagttgcgtgtcccagaatggagggtgttctgacaccccaccctgagccgcaagagcagtcctggggccctggacccctctgtacagtccgtaggaaaaagtcggaatgctctcgacggcctcgtcccagcctgggacaggccccctttcccctctctctgcaggccaggagggcctccttcctgccacgagggaggggagtcgggccccaggtcgcccccgcccccagccctgcatgcaggtgccctcgctccgccccatcagttcctgcccctgcccctcatgcagactgccctgctggggccgggccggagggtggagcagaaaggggaccccggagccgagcgaggaggaccaggcagccgccgctgccgcgctaagccaccacctgcgcttaggtaggcgtcctgctcgccgactttcagttccttgggagggtgttgggtgtcgtccttttcaaaagtgttttggagctttctgtgccccccgactttcccccgcctccccgccccccacgtggccacttttctctggattttagctgtaatgtctttactctttatttaggggtggggcattcattgtttgggtcttttgctgttggaatgggaactcctcctccatttgagcaacttgggaacaatttggtaacacaccacaggaagtagctctcccccccagccccctcctccctcaagggagggttggggggcctgtccagagggtcttcagaagcccccctgggagggaggggaggatgagcacgcccagctcccctccagggtgtgacttggcccctctggcttgtctttctgtgccttactcctcctcctgcgtctcccgttcctggccccttcttgagtccttgtgcctctctctttctctctctttcttaattgtatgaaaacacaaagcacaggtcaggatcctctgagagaaaatcaacattgcaccacgtaggggtgggctatgggctgtatttattgtgaatctagtttgtgaggctgtggccccgagctggcggagggagggaagaggagggagtgacgggaggggaggaggtcagcgacctggggccgtagcggcaggcgaacggtgcctgctacccagctggaagccacaaggtggctggctccaggggcggcttttgttggaagttgagtgaagccctccccctgtcctcagcgtgcagccctagaggaccccagggctgaggggcagtggatcctgcgggagtctcccggggcgtggggagtaaggccccgggggtggggggccgggtgggccgggcgtgacgcgcggtcaaagtgcaatgatttttcagttcggttggctaaacagggtcagagctgagagcgaagcagaaggggctccctgtccggcccacgtgccctttccctcgacgacagtcgagggctcgggctctgtgggactgtgggagctagggtctgcggggcgcctgcccgggcgaggtcggaagctgcaggccagctgggcccgggccggagcgtgcccggcggggctgcccgggcgggcagggggtgggggctgctcctttcccaagtggtgttgtgaggggcaatgagggcaacaggagatgtggggacgtgttaggagagaaaaaaaaaaaaacaaaaatatatatgggggaaattaacttttttttttcattgaaccaagtgcaatgcatcagagagttttcctatctttgtatgttaagagattaagaaaaaaaaattctatttttgttgtaatgtcctcgcggctctggggacgctaaaagaaccgggcctgccccgccctgcgcggggataacgaaagctgagtgtttttcccttttttttgttcgtttttagtttttttttttttaagtcgttttcctgcgttgacgaggatgatctggggtttttatttgtttcgtcgttcgttctgtttcggtgggagggctgaaggaaacgttcacattttagagtttaaaaaaaacacctcgacatttaaaaaatcaaccaacacaagatcaaaaaggaaaaggacgagagaaaaattatttttaagataattaaacataaaaccctggtgcttcttacattataaagtacgttttaaagaacccacaaactattatacataagtttatgaatcaattaaatatcctgcacttgttaggaatacgcatatcccttctttgttgagtttaacggaacgggacagcggcgtgcccccggcggctggactgctccggccgcgggtctccccgggcgcccctccctggggcccagcacccctcctcgccccatccccgtccgggtacgggggcgcggcaggggtccccggcccctcccccgcagaggtcaatgccaacgaacaaacgtcccctccctccctccctctccgccccgagcgcccttctttgagccagacgccaacttgaccctcaccagcattatcaggagcgcgctcagcaagttggtagtttcctcccccctttcccggcgcccctcccgcccccattcaacatctctcatcctatccccgaccccctccggggaacaccgggaaggctcgacgctccaggacaggaccagccacgctgacaggtcgatttgcccaggcccgcgcccgcacgcacgcacgcacacggccccgcacacagccccgccccaccccgcaaccagccctgtcgactgccttatacacccgcccccgcgctggccggccgacctagtgccttgttctcacccccgtgctggcggagcggacgccgcgctctgggtcccagaggggccgggtggctcagacgacccaccactcccccaccctgaccgtgctgaacagacccccccacacgagagaaaataaaggagcaataaagtcacgagaactttcgtcccccaatcgagagcccgaggggcaccccagccccgcctctgctcccccccaccccacccaccctcggggcgcccccctccccccgcaagccagcctgggccagccccgcttcggcccctcccgggagatccgtgcgcccgaccagcaccagcatcgcggaccgcaaaggccgcccgtcccgtcaaacaagtttcttcttaggctaagaaacgcagtatatacgagtatctctatatatagtactaatggatttggtgtgcttcccccttagcgtccccctccctctgctcctcctccttcagcctggtctccccctcttctctgccctccacccccgtctctgcactgagatacataagaaacaagggtagtttactgtctgttttgttttctgggttttcagtgtcctagcggaatgcaagtaggcagccagcccgtctgttccctctccgccccgccccgccccgcccccgtcactgcgcttctgttataccatctttgcctgactctctccggcttctccattgaatggctaatgtgtatgtgaaataaagaaataaagaaaaacaaacgcgagagcgcctgacccttcgctaacgcgaccgtgcgggactgggtcggggtcggtagggtgcgtccccgacttggattctgcgcctctgtccaagcgccgggagcgcagcagacgccgtcgacgagcgtctgcccctgggtctcccggaggggccgacggtgagaaaagcgaagcctccccagcccctcctggcctccccccgcgaccccagcccggaaaaaatgaggcaccacttgggtcctatgactgctctgccatgttgctttgccgacctcgcccctgggaaggggaccgggcaaggccacttccagagggttgtgggtgatttttttaagggtctgcgggtcccttgggggtcgatgatcacccttccggacccccgagaccttgcccctgacgtcttcactggtccttcttcgggggagttcgctcccgaacatgcgcagcacgtccactgccctttccttgacggccctgggccgagtccctggtgccctccggctcagaggtgctgccgcgtgcggtcaccgcacctctgggctcaaagcggtttgctccatcttgatgggccgggccgctccaccggggctgccgtcggggtcggccgggggcgcgggctgcgagcgcgctgccgcctcggccctgcgtccggatccccggcgggcgccgtcgtctgggacccggtgcaccggccgtttgcgaggcccgggaggggtggggcctgcggccagagctgcggcttggtcgcgcagcagccgcaccaggaagccgatgtacttcatggctaggcggagcacctcgttcttgctcagcttccggtcgggcgggtgcgtcggcagcagcttcctcagctcggcgaaggcgccgttaacgttctgctgccgccagcgctcccggctgttggtgaacacgcgccgggccaccttctggggctggtgccctgtggacaaggagggccgggttggtgccatggcccaaagggcggcccctcctgccctcccgctagacacgcagcaccctcgtgggaacttaaacccaggccatgggctggggctttctccacccaaggggtccacgggcagctctccccacccctcccaagagccatccagacaagaatcatcacaggcccggcctacggacaagggcctgctgtatctgtgactatgggcacctttatgtcaatgactgagattccctaaagaaagatttccttgtgtttgtttggtctgggaagctgtccgtggggccctcattctgattgtgcccaagtacggctggctgggtgtactcatgggtctgagaggtcctctcattatgactgtctgtgtcctgtgtcttgtatgactgtgtgagactcttgttatgtctcatggctgtggttatgtgtgatgttgccatgtggctgtttcacgagtggctgtggttgtgtggctgactcttgtgtggccgtggtcctaagtggctgtggtcctgtggctgtcttgtgtgtggttgtggtcctgtggctgtctcttgcatggctgtggtcttgtggctgtcttgcgtggctgcacattccagtggagctgtcattttgtggctcccatgccctggtgtggcatgctctgttttgccgtgactgcggctacatggcttggcctgttgggtggcggtggttgtgtggggctggctatgggactgcgattttgcacatgggtagaacctatgtgggctgttctctgtgtgtgctggaagcacgtctccccgaggtggagtagaggacagacatgagccccacacagagacggccaggccttctgtgcacccacaagtgcacatacaggcatacaaacccacaaggcacacaaacccacactcaccctcagccaggtccagctcacagtggcttggtctccgcttcaaccggctgctagggaagatgctaaaaggtcctgctggcccaatgtagacactgtaaggggtcgtgggtcactaatgccttgtgggcaaggaccctggcccccaatccccactgccccccaccccagatccccactgacctgttgaggaaggggtgagggtggtagtgcagggccaaagtgggcggggcagttcccagggtggagagttgcagcagcgggggccgcagagtgcccagctctgtggtgggcatggctacccctgggggcctgctgtggcccaggctgatcactggtacaccaggtggcagcctggggggcgaggagcctcctcggtggcccacctcctccacctgcgggggcccaggcgaggcaggcttagggggtggggcaggcgctgggctgggggcacacaccatctctgccttctcagtcatggtggggcccacctctgcctgtgcctgaggcgggcacatggaccccgacgtgggggtactcacctgtgggaaagaaggcagccagtggggaggaggactaggtgccccgctcccacctgcttagctcaagaaacccctcaaatgggaaggagggagggggagggggaaaggaggaggagagaagtttcagtaggcaaaggcagatggcgggggcaggcccagaaacttccaggacacgggaggggggtcctacgttagagtaggaggcgccccccaggtgctaggcagcgcactgtccctgagctctttgtgacccaggaggggcgctgttgcccagcctctgagcaaatattccttcttccagaattccctcacctctgcagcctggagagggaacaagacagggagcccctaactgatcctgggatccccagaaaccccaagattaaccctgttatcctcagatctaaagatccaacccagagactcctcattaactcattgatgccatgtgagcttggaatccctccaagatggactctgacccttcacggaaggcccccagcccccacccaggctgaccctctgcacctcaagaatgaccctgcggttcttcccattgctgtccctgaaagtgctccataattgcttgagtgacccccactcccactgcaaacatcccccatagcaaccctgtgaccccactactgacactatgacctcaaatgctgaccctagacccccaaacactgaccccactgcccagtccagtccagtcatgccccaaccctccctctggcttggaagcccccatcctcatcagcatccacgctttttaaaatttgtttatttttttagagacagggtctccctctgttgtccaggctggagtgcagtggtgcaatcatagtgcactgcagcctcaaattcctgggctcgagccatcctcctgtctcagcctcctgagtagctgagagtacaggcatgtgccaccatgcccggctaatttaaaaaaaaaaattttttttgtagaggcaggttctcactctgttgtccagggtggtctggaactcctgggctcaagtgatcctcctgcctcagcctcccaaagtgctgggattacaggcatgcaccacaatgccccgcgatcatccacagttttgcatactgttttgacatccctgtttgctcttggttccagagtccaggatgtcccagcaaggtgtgagactgttggcccctctgccctgtcttcctcagctaggccctggggaagcaggcctggcccctcactagtgggtccctgctggtgaatgaatgaatgaaggaatgaacaaaggaatgcaggctgggtcccaggcccgggatcctccacctttaggcccgctcccctcttaccccagcactgttcttgcagcctggtgagtgccctggctctgtcccgtcagggctggcagtctgggccagggtgtggtttccagcgtcaggccaggctctgctgtctcgcgagggtccggcctcaatgctccaggccccggcgttgggccgcgcctcctcgtgggcctcggaaggccaggatagccgaggtctccgcgtaggtcccccccagggaaagtgagcggctcccgggccggcccgccttctccccgcccccggcggcccggtttcctccctctcacccctggcggcgcagcggccggaggatgctggcccagtgcagataagggccaggctgcctggccgcgcctgataaggagcctggctgaccccggaggaaaccagcgggcggggacctagcagcgcgggcctcccggccccgcccccagccggcgctggcaggactcggtccgccacccctcagggcttcgccttccgctcccccagccactgtagggaccccgggcctctggggacccgggccccagggcagccggggagggaggtgcctggatgcacgcagggggtaaactgaggcagggaagctgcctcctcttatgtccgagtctgccctttggctttgcacactccctgcccgaatgtctgtgctgatgggggtgagggagagccctttccggcccgttggggccgcgtgaccctgggcccccacctcctctcctcacccagcctggttcctctttttacagaggcccttccctcctctccaccacccctacccgggagtggggcacccaaaggggaacagttctaacagtctggccttgggtgtccagcctgggcaggtgtcccaagccctcagcacagtatccacacatttccaagcccaggagggtgagaggaagagccatggctgtcaggggtggggtggggaagttggatttcctagggtgctggggctggtgtgaccttccagtagatgcccaacaggtccccacaactataggcctcttggctacaggatcacataactccaacttggtggtccatggccctcaccccacagcacccggccccttcatggggggcagttatcctggcttggtggtaaacctcaagaccctactggagcctcccacagggagaggctctgggcacagccaggcagcagcagctaccagactgccacccacttgtgatactcatgctttggcccgtctgtgtatctgggcaactgcaagagcccccaggcaggcaggcacccagcagcaggactaccaacccccccccccccccgcccaggaatggggtggagcccaggaccccacgatcaacacctccattgctttcctccaaagaagcaggaactaaagttttatgcagtaaaggccgggcttggtggctcatgcctgtcatcccagcactttgggaggctgaggctggcggattgcttgggctcatgagtttgagaccagcctgggaaacatggcaaaaccccatctctacaaaaaatacaaaaattagctggttgtggtggtgcgtgcctgtagtccctgctactctggaggctgaggtgggaggatggcgtgagcctgggaggtggaggctgcagtgagccaatattgcgccactgcactccagcctgggccacacacctagaccttgcctcaaaaaaaaaaaaaaaaaaaaaaaaattaagcgctaactctgatatcgctacaaggagggtcctaagattagcctcattacagatggggatgaagggagcaggagccagagaggggatcctgccccaggactcttcgttaacgttactaaaccccactctggagggcagggaggggtacagctccccctcactgggtgtctgggcagcagcctgcgaggtccctctttgtgtgcacgcccccctcgccccgggcctcagggcaggaagcacctggtctggagcggatgcacagggcgcctggttccggtccagcttccgccactgtggcccctggagagctgggccaaagaaaccaggcggcgaggaggcagcggcgcgaagacacgtgggggctaccgggcaggagcgccccactatgcgcaagcccgtggcctggagagcgctgaaggtgggagggggaagaggggcagaacccccgcgggagcgagcgcacagctgccgccccgtggccgcttcgggaatcgctggctccggctctggggtggctcagtgaccctcgctgcagaggggccgaccactgtgcagatggtcagctcctacctcccatacagactcaacactccagccaggcaggggcgaacgatccccagaggaacagatcccagtcatgcagctgtatggaccaatacacaaaccacaggcaatcgggagaaggtgacgtgacatctctttattggttcagtctatgcctggcccagcggcagccccaggtccagggggggtctggttggaggtctctggacagtcaggggcagcatcagcagaaaccctgggtgtcggggggctgtgggagtagcagcactggtccccgcgttgacaggtgccctggtgggaagatggtgggtgtgaacccctgcccggagctcagcagcccctgatgggatcctttcctgggatgggaagcccactcccaaacacttgcctggccccagctcccccaattctctccctgttgcccaaaggggagactcatgtgtcctgcagtggaggaaagggaggagggacctcacctccttaaacctcttgcaaggaaatgtcttgagccgggcagcccgctgggccacatcttccggcggctccttccgcttgttctgaagcagcctgcgtctctcctccatagcttcgtcggccgccttgcccctgtgcgaggggaggagtaggtgggaccccatctgccctttaccccttctttccctggctgagccccacccccaccttaccaccactcaccctggccgggcacgaggccggggaccccagttggcctccgggttagcctggaagcgcttgagtcctcgctgtcgggagctggggttggcatcttcccggatggtgaagttggcctgcagcctagggaagcaggggtggggcgttggggctgggggaagctgccacacgagtgtgtccccactccccacagggcctgtccgcctccacaacacagcacgaggtgtctgctcatgtcaggattctctcattcatctaataaacatttttggtttttttaaagagatggggtctcggccaggcacggtggctcatgcctgtaaatcccagcattttgggaggctgaggcgggtggatcacctgaggtcaggagttcgagaccagcctggccaacatggtgaaaccccatctccactaaaaatacaaaaattagccaggcgtggtgccgggtgcctgtgataccagctactcgggacgctgaggcaggagaatcgcttgaacctgggaggcggaggttgcagtgagctgaaatcgcaccactgcactccagcctgggcaagagagtgagcctctgtctaaaaaaaaataaaataaagatacagggtctcactctgctgcccaggctggagtgcagtggtgcgatcgccatcaaagctgcagtctggaactcctgggcttgagcaaccctcctgcctccgcctcaagctcctgagtagctgggacgacaggcaggtaccaccatgcccagctaatttttttagttttctggtagagatggagtcttaattactgtgttgcccaggctggtttcattcctgggctcaagcgatcttcccgccttggcccccaaagcactgggattataggaatgagccaccatgcctggccttaataaacatttttatttaacgactgtgtgcctgcattgttctcagtgctgggaatagacagtgaacaaaatggacaaaaagttacccctggtatgctggtaatgctaattttcttttcttttgggatggagtctcactctgtcgcccaggctggagtgcagtggtgcgatctcggctcactacaaactctgcctcaggttcaagcgattcacctgcctcagcctcccgagtagctgggactacaggcatgtgccaccacacctggctaattttttttttttttttgtatttttagtagagacagggtttcgtcatgttggccaggctggtcttgaactcctgacctcaggtgatctgcctgtcttggcctcccaaagtgctgggattacaggtgtgagccactacgcccagcccagtcagcagatttagttatttttatttttatttatttatttatttatttatttgagacggagtcttactctgtcacccaggctggagtgcagtggcgctatctcggctcactgcaagctctgccccccggggttcacgccattctcctgtctcagcctcccgagtagctgggactacaggcacctgccaccacgcccggctaatttttttttttttttttttgtatttttagtagagacagggtttcactgtgttagccaggatggtctcaatctcctgatctcgtgatccgcctgcctcggcctcccaaagtgctgggactacaggcatgagccaccgcacccagctatttttttattctttttgagatggagtctcgctctgtcgcccaggctggagtgcaatggcgcgatctagactcaccgcaacctctgcctcccaggttcaagcgattctcctgtctcagcctcctgagtagctgggattacaggcacccaccaccacaccatgcccagctaatttttgtatttttagtagagatggggttccaccatgttggccaggctggtcttgaactcctgacctcaggtgatccacctgcctcagcctcccaaagtgctgggattacaggcgtgagccacctacccagccccagtcagcagattttgaatctcacttgaagaatgggcacgagtctgtgtggggcagcatctgtgttgtctgcacacacatgtgcttccatgtctgtgggcagccctggccgctcctgcatgtgcttgcccctacctgggctccacactgagaatgcggaacgctgggctagtctctgatagtcgctcccgtttcaccggacattccttctcctgggggcagaggtcagaggttagggaatactaggcccaagggacctccaggtgaccaccacctgccctcccacctgcatgaggtcagccctgccctcacccagcaacgcatgatgtcccagagggcagaggcaggggcatccgtcttcacagcgttcttacaggcgtgggagagtgagacccggaagtcagcgtggaggagggccgacctggggaacagcagggattatgagggagatgccggactccttgaccccaaagcccaagctgaccagcgtaggtaagactaccttcggcaagggctcatggctacagagttcatttcttttcttttctttttttttttttttttttttttgagatggagtctcgctctgtcgctcaggctggagtgcaatggcgcaatcttggctcaccacagcctccgcctcctgggtttaagcgattctcctgcctcagcctcccgaatagctgggactataggcatgtgccaccacgcccagctaatttttgtatttttagtagagacagggtttcaccatgttggccaggatggtctcgatctcttaaccttgtgatccgcccgcctcagcctcccaaagtgctgggattacaggagtgagccaccgtgcctggccttcttatttattatttttttgaggtggagtctcactctgtcgctcaggctggtgtgcaatgatgcaatcttggctcactgcagcctctgcctctcaggttcaaccaattctcctgtctcagcctcctgagtagctgagattacagggatgtgccatgacgcctggctaatattttggtatttttagtagagatggggtttcgccacgttgaccgggctggtctcgaactcctggcctcaagtgattcgcccgcctcagcctcccaaagtgctgggattacaggcatgagccaccacacctggcctttttctttttctaattattattattatattttaaatggagtctcgctctgttgcccaggttgatgtgcagtggcgcaatcttggctcaccaccgcctcctcctcctcccaggttccagtgattctcgtgcctcagcctcccaagtagctgggactacaggcatgtgccaccacacccagctaatttttgtatttttagtagagacagggtttaaccattttgaccacgctggtcttgaactcctgacctcaagtgatctgcccacctcagcctcccaaagtgctgggaatataggcatgagccaataagcctggcctaattttttttttttttttttttttttaaagagacagggtctcattttgtcacccaggctggagtggcatgatcatagctcactttagcatcaaactcctggcccaaatgatcctcccacctcagcctcctgagtagttaggactataggcatgtatcaccatgccaggctaatgggtgtgtgtgtgtgtgtgtgtgtgtatacatacgtatgtatgtgtgtgtatatgtatgtgtgtgtacatatatatttatttatttatttgttagagatagggtcttactacgttgcccaggttggcctcaagtgatcttcctgcctcagcctcccaaggtactgggattacaggaatgagacagtgcaccgggttctccccaccccctcgcaagttctatgcatgagaatccctggacttgccccaggccaccctgtggtctgggacaggctcctcccgaccccaggggctcttaccgcaactgcaggaggcttggtgtgttgcagtggatggtgctgctcagctggtccagggtgtagtacagaggcacgtccgggagctcctgcgatgggggacaggatgggcatgagtggagatggacgggcacaggtggagcccccttccccgtcacagcccggctctcacctcagtgatgacgctcaggacccctcggatccgctccgaggtgtggaagcggccggggttagcgctcacagcctccaggacacggcccacaaaatccaggtcatggatgggctctgcccacatggggccaccaagctgggggcgcaccggggacaggtgagcagggactatgaccttcaagaccctcttgctcctttgcctcccctggcctagccctacctggtgtcgttgcccacagtgttcacactcgggggtcacagggggaccacaggctgcagagaacttggccctaaacagagaggggtggttggtggggagggaggaaaaccctgggactccccttcttctccttcctccctgctcaccggccgctggggactcctgacgctttgccgagacgctgaaggtggaaggccccgcagcccacacactggaacaccagcgcctgcttgctgtggggggtaccagtggccacgagttcccagcgtgaccacgacaccccaactcctcccttagactggctctgtcccttaagaagccccagatcccccagggcaaggtcctgtctcctctctcaatccaccaccgctctctgcccccgggctgacctggctgaggccttgaccttggcctggccggtgaagacacggacaaaaacacgcacgtagaagtcagcgctgatgctgagcagcggcaccacgaagcgctggtagcagttggcgcggaggtccaggctgtgcaggacgattctcagggcctgggggtggggggtgggtgtcagcctcccctccactatccacccaccccaccaggagccctatgtggtactcacaagtacaggctcagggccagctccctgggatccaagcccacccctgaaagtcctggctgtgggaccctcaacaagtgagtatcccctctctgtgcctcagtttcttcatctgcaaaatcacaacagtccctgtctgtggcactgctgggggcactaaacgagtgaggaaagcatagatccaacctattctgaccagcattatcggtgtgccatgtggcatgtactgaggacccacgttccagcccccaagggctctgtgggcaggaagtggggatactaggtgctgtagaactgctggggcctgggccgggcgtggtggctcatgcctgtaatcccagcactttgggaggctggtcaggagtttgagaccagcctggctaacatgatgaaatccccgtctctactaaaaatacaaaaaattagctgggtgtggtggcgggcgcctgtaatcccagctactagggaggccgaggcaggagaatcacttgaacctgggaggcgaaggttgcagttagctgagatctcaccactgcactccagcctgggcaacaagagtgaaactccatctcaaaaaagaaaaaaaagcaaaacggctagggctttcctgctagtgtgagactctgatatgggaaaggagacagcatttcccgggctgacttcatgacaggaccctttaggaacaagggcaagagccctctgtggaccacgctggagtgcagtggcactatcaaagctcacaataactttgaactcctaggctcaagtgatcctcctgcctcagcctccagagtagctgggaccacaggcatccaccaccacacctaggtaatttttagggtttttttgtagagatggggtcctcgctatgttgcccaggttcctgacctcaagtgatcctcccaccttggcctccgaaagtgctaggattacaggcatgagccgctgcacttcgccactcagccttcttgaatcctgatcagacactcaatagggtcagaccattttttttttttttttttgagacagagttttgctcttgttgcccaggctggagtgcaatggtgccatctcggctcaccgcaacctccacctcccgggttcaagtgattctcctgcctcagcctcccgaatagctgggattacaagcacccaccaccacgcccagctaatttttttttttttttttttgtatttttagtagagacggggtttcaccatgttggccagggtgctcttgaacacctgacctcttgaacaccgcccacctcggcctcccagagtgctgggattacaggcgtgagccaccgcgcccggcctatttttttttcttttttttgagacagagtcttgctctgtcgcccaggctggagtgcagtggcacagtctcagctcactgcaagctccacctcctgggttcacgccattctcctgcctccgcctcccgaacagctgggactacaggtgcccgctaccatgcctggctaagtttttgtatgtttagtggagatcagatttcaccatgttagccaggatggtctcaatctcctgacctcatgatccgcccacctcgacttcccaaagtgctgggattacaggcgtgagctaccacgcccggcctattttttttctttttgagatggggtctccctcccaggctggcgtgcagcggagtgatcttggctcactgcaacctcgcctcctgggttcaagtgattctcctgcctcagcctcctgagtagccgggattacaggtatctgccaccatgcctggctaatttttgtatttttagtagagatggggttttaccatgttggccagctggtctcaaagtcctgacctcaggtgatccacctgcctaggcctcccaaagtgctgggattacaggtgtgagccactgcgcccggccttcagaccatcattgtgcccattttacagatgcaaaaaaacccgaggaccagaaaggtgaagtcacttgcccagagctaccagcaaagctaggatttaaacccagtcctggaaaaacgacctttaaaaaaaaaatttttttttgaaaagttgttttaatacagaaaactaaaataatgtggccatgcactcctgtcctggccaaagccactgtccccaaatgaccatgattatcagccatgctcttaggaactatgtgggttgaagacacgcctgtcgttaacagcctgggatgcatctggccatcagcctggaggaagctgagcaggtctgaggagggggaaagtgtattgggaagggactcagacaaccacctgtcccccggtctccctggctggctggcagagggcccctcaccatctcgtggcaggcccggctcttgagggccatggccccgtacttgctgtagcacgtctccccgctgttccccgccaacaccgccatgtctgtgcaggtcacacacagcaaccctgcagagaggggctgggcagtgagaaccctccaacaccccaagccctgctcccaccccagtgccatccccacctcacctccttcactcacagcctgcacagctgcatccaggaaggtggctgggctgccataggggtccagatcgatgacgtcaaacctctccgacaccctctggtgctggtacatcagcatcctgggtgcaaagagggccaggtcctcagcctcccacgccaggtaccttctctgtcccctacacatattaactcgtacagcacagtggtttgggtctgaactccggggccagattcccaagttcaagtcctggctcagtcatttatttatttatttattttatttttgagtcggagtcttgctctgtcagccagctggagtgcagtgttgtgatctcggctccctgcaacctccgcttccccagttcaagcaattctcgcgcctcagcctcccgagtagagtagctgggactacagacatgtgccaccacgcccagctaatttttgtatttttagtagagatggggtttcaacatgttggccaggctggtctcaaactcctgacctcaagtgatccatccacctcggcctcccaaagtgctgagattacaagtgtgagccactgcactggccttggtcatttattaaactgcacaattttcctacttaggaaaagcaccatgtggaactcagtccacacatctaaaacaacaacaatactgatataagacgtatctgcctgacaccatttcaagcagtttatagatgtattaacacattttttttttcctttctttggagacagagtctcgctgtgtcacccaggctggagtgcagtggtgggttctcggcgcactgcaacttccacctcctgggttcaagcgattctcctgcctcagcttcccaagtagctgggattacaggcacgtgccaccatgcctggctaatttttatatttttagtagagacgaggttttaccatgttggccaggctggtctcgagctcctgacctcaagtgatccgcccacctcggccttccaaagtgctgggattacaggggtgagccactgcgtctgacctcattttaaaatttttgtagagacgggtttcactgtgttgcctaggctggtcttgaaatcctggcctcaagcgatcctcctgccttggcctctcaaaatgcttgattacaggcatgagtcaccatgcccagctaattacttttcattgtctgtgattactatttggattctagtaaggtcagaaaagtaaaaacttttttctctgtaaaaggtcagaaggtattttaggctttgtgagtcatatgtggtccctactgcatagtcttcttttttaacctttaaaaatgtaaaaaacattcttgggttgtgggccattgataaactaggctaggccgggcgcagtggctcacgtctgtaatcccagcactttggaaggccgaggtgggcagatcacttgaggtcaggagtttgagactagcctggccaacatggcaaaaccctgtctctactaaaaatataaaaattagcctggcatagccaggtgcagtggctcatgcctataatcccaccactttgggaggccgaggcgggcagatcacgaggtcaggaaatcgagaccatcctggccaccatggtgaaaccccatctctactataaatacaggtgggtgtggtagcagatgtctgtagtcccagctactcagtcgggaggctaaggcaggagaatcacttgaacctgggaggcggaggttgcagtgagccaagatcacgctagtgcactctagcctgggcaacagagcgagactccgtgtcaaaaaataaataaataaataaaaataaaaattagccaggcgtggtggcacgtgcctgtaatcccagctactcgggaggctgaggcaggggaatggcttgaacccgggaggcggaggttgcaatgagctgagatcgtgccactgcactccagcctgggcaacaagggcgagactacatctcaaaaaacaaacaaacaagcaaacaaacaaaaaaaggctgtgagccccacaggctatagtttgccaactcttgcgaaggtcaccaattttgcatgttttgtttcctgatgcatttccagttcttgaaaacggtgcctgacacatagcagacactggatatactatggctcatttgaatgaataaaaggagtgtaagaagttaaaacagagaccaggatgctacttatttctggcacagagtatggatcataccataattatctattactcatcacagcaacccctgtaaaactaattttctcagttgacagacaaggaaactggggctcaaagaggctaagtcactcactcaaggtcacagagtgagaatgtgacagagccagaatttgaccccaggcaggcttgtcccagagctaggctgtgatgcccagaacctaccgggcatctgcttggctcggctgtaccaggtgggccacgtcattgagctggacattccggcgtatgagatccacagcccgggtggaggcatcgtttgcaaccacagatctgagcccaggcacctctagggcaaatcgaatggaacgtaggcctgaagctgccaggccttccagcacatgcaggccttcctgttggagtaagcagaaaacctccctcacatctccacctccatcctcttctgggccccaaggagcccccaccacccacctcctatagctctccccctccaggagccctctgtctcccgctaaattccagggctgccagctcctatgctcaggccccacctcacagatctcccccacggccgctgtgcgaggttggtctcctgaggccaggttttcactctctttcagttcaaccttttcctcctcttgctctgacaagtccacgaccactttttgcgtgtccttctctcctggaaccttgactgcagccacccagaggcacaagtcagagaataacaaggtcccctctgagaaacctccccttaatctccaaaatatcgtccctgaaatccctgcggaaaggctgaaggagcagaacccagggcctgctatgtggctgaagcccctctggatttgggcggcagaagagcccaggcagggagataaacttgtgtgacccccgcccaccagaagcctggacctccactcactctggattcctttggccccaagctgaatgcgagcaaactcggtgatcacagcacatctggtgggagacagaggactagctcataccccgcccccgccatccacactgacccactagccgatgccaggctaacgtctgacccctgctcacgtcaggtcccgattgaattcctgcaccgggttataaaagacctcgttggcactgggaaaggcgattttggcagccccctcggtgactgtcgtctcctggacttcacgtggacgttcttctccgtagggcccggtgccgttctccatcgctgctgtattcggcagccctggagactgccactcgaaaaaccgggctctagagagcacccgggcggagcggaaagtgaggcttagccacagagacgatccttgcatgagacatccgctggcgcctccgcccgccaagcctggttcggggggcgggggagggcacagagagggtcagagagccgcattccgggcccggggatgtcctacatatctatgaggtagggactaggaaaacctgcggcctcggtaagctgatatcccctcgttttggggatgactggtccctgtggagccgatgccctcgtgcaggcccgccccgagtccgaatccctccccgcgctgcctagcccgtcctcacctgctctcgtagccacagaaaaccgaattagtcaaggtgcacgtttcccgaattaggacctgggcgccgccatgttggcacagtgggtgggcgaatcacatgatagtggttggccagtcaatgaggaaacgtacggtgggcggccgggatcaaaatgaaagccataaaggaagcgcgctgatcgtgctgttccgggggtgttaatcacagtggatcccctgggagaggacacgtccctagtcccatttcacagatgaggaagttgtggctcagaaaaggggcggtaagcggagaaacccaacacttattggtcctcttctgtgttctgggtgctatatacacattatttcagagcaccctgcaggaatgactcaggctctggagttggatttaccgggtttgaatctcagtcccatcacatgctctgggcaggttactcccgcggcttcacttttcttacctattaaatgagaatcgtggtttctcagatagagcaaagattaaatgacagattcctggaaagtgtgcaaagaaccactctaacattgtaagcgctcggtaaagttctaaccagtgtatgaaggcaggacagcgaagtggtcccggctacctgggttccagtctcagctcgccctgcgacttgttaactctgaacttaagttaccgcttttgcaaaatgggcagaacttttttttaccatttgttactgggttgtagtgagaagtaaacgagttagtgcaggtaaaatgctaacagaacctagcatccggtaagcatcataaaagtcttaggtcttattgtcgcttttgagcctgtgtttaaatcctggcacctaccatcacttccttgctgtgtgatgatcttgaccagctttcttcatttctctgtgcctccttttctttctttctttcttttttttttttttttgagacggagtctcgcccaggctggagtgcagtggcatgatctcggctcactgcaaccaccgcctcccgggtgcaagcgattcttctgcctcagtctcccgagtagctgggattacaagcgcatgccatcacgcccggctaatttttgtatttttagtagagacagagtttcaccatattggccaggctggtttcgaactcctgacctcaggcgatccacccacctcggtctcccaaagtgctgggattacaggcgtgagacaccgcgcccagctgcctttattttctatagtgtgtctgtagcagttctcactaaaaaatgttactgtgtagtttaaacgagctaattcccataaagaatgtaacgcagtgcctgccacaataaacagcagtcattattgtttttgttttacaggaaactaaagttcggaaaggtagagcgacttgcccaaggtcgcgggactagaaggtggcggggccaggattcgaaccatcgagctgagccgacgtactggcgaggatcccccaggggcatagagaggagacggagccggttagaaggggcgcgctcggagctcggctggcctcgcctggagggcggggcccgagggcggtgcgcgggcggggccggggccgctcctccctggcctggctgcggcggcagcgcggcttgcgctcgctcggcgctcggctggggcggcctggcccacaatgaatggccgccgcggctgccgctgctgctgaggcggaggccgcggaggccgcggaggcggaggccgaggccccggcgcagcggggcgcgccccgggcccaggcccggccccagccgccgctgcggagcccgccgggaccccccggagcgcggccacggcgcaggtgaggcggcccgcctcaggcccggttccggcctcctccagccggggcggcccgagggctgagtggggagggcctgggtgctttctcggaccgaggaggagccgggcccgcagcctgcactgtgcccgggcaggcgagtgtgtggaggcccagctaccgcgggcggccttgagcgtccagcccgagcttcagggcttgggggcggcaggatcgtacctggaccgctcccccgtctcccagcgagggagggggccaggtcgggccggggcaggtaccggggatccggggaagttggagggtccgaggcggaaaagtgaggaggttctcgtggatgccggagggggagggggagggggaggaggagtcgggctccggccaggccgagtgggggaggagaggagagcggcgcggccggaggggggcggggaggggccgggcctgcaggtaccgcctgggcgctggaggaggtgggtgggtcaagttacaggcctgggggcggctgaggagaagcccaggaagtggggcacggcgggtgtgggcggagttacttcgtgtgggggcggataggagatcccagagatgttttccgggggtcacatgaggtcaggactcagatgtggggagggggaggctagatgtgggggcgatcaggtaaggtgagggactgctgtaggagttttgggagtcgagagagcagagccttttgggctaggctaggggggatgtgggggcaggtcaggaaaagctggtgtgaccagaaggtatatactaagatgcgccccccaccgcccccaactcaagtgttaaggggttccgtctttctcacacctcatccctgaagcctctagagtcctgaccctaccccttgggcaagcctctgccaactgttcaaaggcactggccagtgggtgtttgtgtgggcagctggagacagtctggaacacctagcttaggcatcttgtttatcacaaggtggcccttgcccacccccaccttatatatctacagggaggcagcccagcagacgttacctgggtattttaggatcctgcattctttctctaccttttgtggccagaagctggtggttcaagcctagtggatgggacctcacagcaaccatcgtatatattagtaccatggcctcccaggcaccaactccttgagcctgagttctgtgtgccatctccctgggggtgaagaattagagggaatgagcatgtaaaactctgttgatggtggtttggaggctcccgacggggtgaaggcagggcacagagaagagttaaggggatcaaatcaggcactcacaccctggcccagggatctacctctgggacactcgtcctgggccaggccctgtgccgagctcgctggtcggatgagctcattgatggctcaccaccaccagttcaacttaggccttctctggggtccagacgaggaagctgaggctcggggtggtgtggcttgtctcagatcacatgagcagacagtggctgaactgggattgtctgaccctcagcccaaacccatagtcactcaagtggccttccaggagggtgactgaaggagctcctcgttctggattccctggcgggcgttctcctccgtccaggccttcccttctgctcaccccgggggatgggtcaatcccctttgggacagactgagtttccatggtgtccccggggaatggaacagtggaggtatctttctcggaggcctggtcaccccttcttccccatttccctcctgggagccaagaggtcaggagtcatggaactgtgggctgaccgtgggaagctgaggaggcctggcaccaccagggctggacttgactttgcttgcctagactgtttttgccccactttggcccccagtcggatggcagcagcttttgttcctttctgggctaattgcaaggctgttaccagggtgtccttgggactttgatttgggatcttcagcacctgaggcaggagccacaaactgctgggtcaagtggtgtcagccagttctgggtttaatgatgggttgtcaccctaattctccccagtctccctatagttcccaggacaccctccaacctgggccctgcccttcttgcctgtctggctagccacttggttctaggaggagtaggaactgggccagcagtcccgcaaagagactgaaccatccttcctggctggttgggccaggattgctgcaggtctgcttcagcacagactgggtcctcctggacctaagctgggttggataccagggataggggattggtggtaccatccagtcacttagctgagactgttgggagttggccctggtgagtgggggacaggcagtgcctcaggcagctccggtttgtgcctagaggtagaggagaaggcaccagtaataactgcttttcggtgagaacttagcatgcacagactctgtgggggcaagtgcaacaagtaggcagcccgttgagacagttttatttcactgctgggtgctgactccccgctgggggctggggaagcatcccggagtaacagatccagagcagctagctctcaagcgaccaaactttcacaagcaaaggatcaagataatttcacatacttctgtgtttacaaagatggtgtagcaaagtgaagtcattatgagccatgaggggatggggaggtttcgatgggtggccggaagtgttcccggagagctaagatctgaataataatgttagctaaggggtgggtggtgctggggcgcagggaggggtcagtgttctaggctcaggggacagcacattcacagcttttcttgagtatgtaccagtcttcttctgagtgctctaaacattttgtcttcatgagggaaggagtggggggatgaccctactgtggagacagagactctagtaccattcacaagagagtgaagccctgtctctgggtctcctggatctgcccatcacccccagatggaagttcagaaccccttggcctgcatctagggtatttaaaaaatctggcctcctggccgggcagcagggagccccagcaggttcttgagctgggctttgaggagatgtgagttttggtcagccttacagggtctattgaaggagtctgcctggaggcccgggggtttggagagagtttggggttggcccaacattgtctgaccctagatttcatcagtgtcattgccagagcctgtgtggagagagggatcccatcaggcttggtggggcatattgcttttgggatggtggtgagccaccggggctggaaaacatgagtcagtgttcatgccactctgcgtcctcagatcctccgtgcccctcgtttctcctcctaggttgctctcagcacttgtacacactcgaactcatttaagcccgtggctagcaggtcctgcctgttatcatcatttgacacacaaggcaactgaggcaccctagtccttccttcacacaagctgcaaagtggtctggctaccacccctgtgccgccttccagccactttcatgttcctcgtgtctgcatttgctcctcagtcctctcagccgctactgccttcccctagagaaccctctgggccgcatgaggtggggccgggaggtgggactgggcctgcttgcacattaggtggggtgaggaccagccgagccggcagaggtgacgtgtcttaggttgtgatctgtgtgtggttgtggtcatgtccctccagccttctcatgtgctgcctccttggcgaaggtctcagttcttagagacctgtgcgtcttctctgagggctttgactgtgtccagttcgtggtttctaaatcgagcaaagggagagggtaggtaagggtgagcagacacggtctagtagagagtgaaatttcacacttagcaccacccctgtctcagccatgagactctgggcaaaggtctttacctctgagcctcagtgtcctcctctgataaggagtgacaagtgggcacaactatactgctgtgattcgcaactgggtacagtcctacctccggggacacttggggaatgtctggggacatttttggttgcccctgccgggggggggggggtgtgctgctggcatctagtgggtttataggccagggatgcggttcaacatcagacagtgtgtagggcagcccccaccacaaagaatgattgacgcaaatgcagtggctgggtggggaatctccactgtctggttatcatgaggtttgcgggagaggttggcgtctggggtgtgagtggacagtgctgtgaaggctctggggaaaaccccagcgatcactgcctgttaatcccatgaaatgtgcgaggtctgggagatggtgagaggcataagatgtcttctactcccagggagtttgcggcccagcacggggccaggggatacgactaacagcagctggcattcatgagcaccgactacggggcgagcgccgatcggcctgtgttctttggttgtttaatccttgaaatagccttgtgaggtggctgctgctgtcagcccattttctagatgggagactgatatggggggtgagcagtattgagggtaattctgagtgacaagctctataagggatttgagcctagtacaatagtaggattcaaaatcttaggtcctgcgtggttccctagcacagcccagcaggcccctctcccaggatgatccccatccctccaccctcctttgtgttagcggcaccagggtcacctcagggcctttgcacttactgttgttccctccacccttggttgccgccactgctgccctgtcttttgggtatgatctgattacacgcagggagtgggatgtaactccgaagggtgggcttatggttggagttggtggggagggagcgggcaggctgcgagctccatgaggacggaggcagagcttctgccaggctctccaaggagctggagctgctgcctgcaaagggaggccagattgccgagggctgcgaggaggagcgagtgggaggagggagaggcagcacgcggagactgctcattcccggagatggtggttgcagggagaaggggctagagaatagctgcagttgggaggattgggaaaggaagaatgaaaagaatgaagaaggccttccttggggattagagagagggcaccccagaccctgaggtggaggtcctcagacaggcagaagaccctgtttctggagaggacacatccagtagctcaggtaaagagccccagctctgggctcggccggtccggggttcccgtctggtctctgccttgcttctctgaacaccagttttcccacctgtgaaatgggtctagtcacagctgcctcacatttttgcctgattcgggagccagacggcctgggtataaacctgtgcctgccattcaccagctacatgttccccacctctggcttcacctctctgggcctcattcccatccatgaaatggcaggcaggctcatttcttcctcagaaactgtaaagaagagtaagttaaatgagcctgtctgagccctggccaggtatgggcccagtcagtgaggcttgagtaggggacactgttactaatcctattccaccatggatttaacaatagtcattcagggaaagagataacgaattaaatctgtgggtgtataagaaaaaaaatacaggccaggtgcagtggctcacgcctgtaatcccagctctttgggaggctgaggtgggcggatcacttgaggccaggagttttgagaccagcctggccaacatggagaaacccagtctctactaaaaatacaaaaattagccaggcatggtggtgtgtgcctgtaatcctagctactcaggaggcggaggcacgagaattgcttgaacccaggaggcggaggttgcagttagccgaaatcacgccactgtactccagcctgggcgacagaggaagactgtctcaacaaaaaagaaaaaaaaatactgatgcaagatgaggtcttgctgtattgcccaggctggtctcaaactcctggcttcaagcgtcttcctgcctcagcctcccgaagttctgggattacaggtaggagtcaccgccccccactgaacagtttgttcttcactaactgttttcctggactgccttcacattcagcccctacagaggggtctttctggttctgggtcaggcaggcaacctgagtagctgccaggatccagccacatcctgctgagctgcatgaaggactgtggggctctctggggcctttgttccttgttacacttggagttgctggtctcccttaactggcttgtaggtcttagcccatctgggctgctgtaataaaataccttagactggaagccaggcacattgctcatgcctctaacctcagcatttaggaggctgagatgggaggattgcttgagcccaggagttcgagaccagcctgggcaacatagtgagacctcatctttacaaaaaaatttaattttaatttgtttttcacccgtgacacagccctcaggaggtcctgagaacatatgtctctcgtctttgcaaaaaattgttttaattagccgggcgtggtggcacacatccctagtcccagctactcaggaggctgaggtgagaggataacttgagcccaggagtttgacgctatagtgatccaagattgcaccactacgcttcagcctgggtgacagagcaagaccctgtctcaaaaaaacaaaacagactgggccattgataaacaacagagatgagctgctcatagttgtagagggtgggaagtcccatatcacggtgctagcagattccgtgtctagtgagggcccatctctcatagatagcaccttttaggtatctgcacagggtggcaaggacaaacaagctccccctcttttatacgggcacagttcgtattcatgaggacagagccctcctgactgaatcaactcccgaaggccccacttttttttttttttttttttttggtgagacggagatttactcttgttgcccaggctggagtgcagtggtgcgatcttgactcaccgcatcctccgcctcccaggttcaagcgattctcctgcctcagcctcccaagtagctgggattacaggcatgtgtcagcatgccaggctaattttgtatttttagtagagacggggtttcactgtgttgcccaggctgatctcgaactcctgatctcaggtaatccgcctgtctctgcctcccaaagtgctgggattacaggcgtgagccactgcacccagccctttttaaatttttgatcaacaacttcttttttattttgagatggagtcttgctctgttgcccagcctagagtgcagtggcgtgatcttggctcgctgcaacttccacctcctaggttcaagcaattctgcctcagcctacctaatagctgggattacaggcgtgcaccactgcgcccagctaatttttgtatttttagtagagatggggtttcaccatattggccaggctagtctccaactcctgacctcaggtgatccgcccacctcggcctcccaaagtgctgagattacaggcgtgaaccaccatacctggctgaaaggcctaactttttttttttttttagacggagtcttgctctgtcaccaggctggagtgcattggcccgatctcggctcaccgcaaccttcgcctcctgagttcaagcgattctcctgcctcagcctcccgagtagctgggattacaggcacgtaccactgtgcctggctaattttttgtatttttagtagagatggggtttcaccatgttagccaggatggtctctatctcctgacctcgtgacctcgtgatccgccctcctcagcctcccaaagtgctggggttacaggcgtgagtcaccgtgcccagccagccccacttcttaataccactacattggagataggctttagcatgtgaattttgggaagaggcaaacattcagaccatagcatctgtcgacggccatgtcacagcttccctggaaagacatcaggaaaggactgtgcctttgacagtctctcacaggcccatgctggctggggaattcctcagctctcttccctaagagctgacagttactactcccaggaatcatcctgccagcccccttcctgcagatggcaggatccaccggcagtgtgagcaattcgtcaggtaacactgcggtctcaataggcccctgactgctggctacccaccttggcagctgtcaaaggaggtcgtctgtctgcccagccacagataatgcttctgagccctattcctgtttgagccacgttaatgtggaacaaaacagggagttaggttaggaggaatggaagtaattctttgttcattttttccacgaaggactgtgagcacccactgtgtacctggccaggtcctaggggtagaggacacaacagggatctacacaggcaaactccctgccccagggaaactgacatgaagccccaaaaaatgcccagtttggcaggggtggtggctcgcacctgtagtccgagcactttgggaggccaaggcaggaggaccacttgagcccaggagtttgagaccagcctgggcaacattagggagacctcgtctctattactaaaaaatgcacaaataaataatttttttttagaaaaagaaaaatggccagcttgctaaataaatcataggaactcccaagaaggataagtcaagcagggagaatcaagccagggagttagtgtcgggaagggctttgttggtcagacgcagtggctcatgcctataatcgcagggttttgtgaggctgtggcaggaggaacactcagctgggagttggagaccagcccaggcaatatagtgagatcacgtctctaccaaaaaaaaaaaaaaaaaaaagcatacatatacatatactttttttttttttttttttttttttttttcggttaactggatgggccgggtgccgtggctcacgcctgtaatcccagcactttgggaggtgggcggatcacttgaggtcaggagttcaagaccagcctggccaacatggtgaaaccccatctctactaaaaatagaaaaattagccaggcatggtggtggttacctttaatcccagctactcaggaggctgagacaggagaatcgcttgaacgattcttgcagtgagccgagatcccaccactgcactccagcctgggcgacagagcgagactctgcctcaaaaaaaaaaagaaaaaaaaaaattagctggatgtagctcctgtggtcccagctatttgggaagctgaggtgggaggattgcttgagcccaggagtttgaggctgaagtgagctatgatggtgccactgtactccagcctgggtgacagagcaaggccctgtctccaaaagcaaaagagtagagaaagggctttatgtgaccagggagagtatgaagagctatggctgtcccattcccattctagtaggtccgagagcaagcagggccagactgccaggggccccaataaagcattgtaggggcccaggcagtgtcacttggggccaaggtagtacaaagtggttttgaaggagttgaagatgaatccaaggatctgaatgaggagggccagagctggtgaagctacggcattcacaggttttgggaaggactggagccaggtcctgaaattgttgagtggaggtgtctggggtgtgtgcgagtctggcattcacagggaagtccgggccaaagactccagtgggggaggcatcagtgaatagatggtgcttcaggcctgtcttagtcagctcaagctgccacacaacaaaatatcacagactgggtggcttaaacaacagacatttatatttcagagtgctgggggctggcagtctagatgagagtgccagcgtggtcaggttctggtgagggctctcttcatggcttgcagacagctgccttcttaataccaccgttatgacctcaattaaccttaattagctcccaaaggttttatctccagatacaggcacattggggctcagagtttcaatctgtgaatttggagggacatactttgtccatagcagagccctgagactgagcccagtcccctggaggtgaaaaccctttctggaagggccacactccccatccactactgcccttcctagatctcagctccagtgtcaccccttctgggcaaggtcaggcaccccagtgtgtagcacattgatctgtgtgaccaaggatgaatggccctgtctcctgctggactgtgagctccagaggcagggctactttgtcaccattgtggcctgcccaggcagggacctggcaaatatttattgagtagttgttgggaagtcatggaaaccgtgtgctgtgcccttgggtctcaccagaagatctgctcaggcccagggccaggactaggcactgtcctggccaggaaggtcccagctgccctgtggcctcctgcccttgtcccccacaccctcaggggtgctgatatgctgaattttaaggagagatgattctcatatggttttctgcccttggggagtttatagtcaagtgggacttagtttcctcagaggtaagcttaagggcactgtggccggggtggggcaggagagggacatcttctctagcctggagaagtgagtagctgagggtggaggaagagggtattccaggcagggtgcacagcttgggcaaaggcctcgctgcagtagaggaggaccaggcagtgtgtttgagcctgacttaggtggggatttggtggggactagaaccattaggtggtttagagacctcaatcctcgactccatcccacccctgcttcagccagcaggtgaccctgctagggacctgccagcgagagacccgtttcctctgagtccagtcatgctagctcccttcctggggctagcgtgggtgagggcttcttgcaggggcccacatagtttttctcctgagtccattgggcaggattgggccggattgggccaatcacagagggatggaggggttcccagagatgggtctgctctggcccacactgcagctcacccctgtccactctgtgcgggggccactggggaactagacgaacagcattcaggtcactgtggctcacagacccgtcgccccactccgctcgtccccagcagcatggagggagggagagctcccgtgcgctaattggctgagctatttggaccaattgctaatcaaaggctccaaagccctgggtgctgtggtgctgggctctgaagctgaggttcacaaggtatgggggacctcagtctgagcatcaggttggctctcattctcaggaggggacctgggccaccttcccaacccccacatctctgttgcctcctattatccccgtaacctttcagtctccattgccaaatgggggggttcaagaccagcctggacaacatagtgagaccctgtctttaaaaaaaaaaaaattacctgtggccggtgctgggtgcttggtaaggtcaccttgaagcagtcctgtgcccgttctgcactgttttgtttgtttgtttggttggctggttggttggttggttttggtggggtagtggggtcgggggatgtggttttttgtttttgctttttttgttttagagacagggtctcgctctatgacccaggctgaaatatagtggcacaatcatcactcactgcagcctctaactttttggctcaagtgatcctcccacctgagcctcccaagtagctgggactacaggtgcaagccaccaagccccactaattttaaaattttttgtagagataggggtctcactatgttgcccagactggtcttgaacccctggcttcaggggctcctcctgcttctgcctctcagagtgctgtgattacaggcgtgagccaccgtgcccagcctctctgcactgttctttaacacatttacaaatatttactgagcatctatttcattctaaagaactaatcttgaataaaaccagccagaatgtttgccttcattgagctgacagtgcccttggaggggttaactgtacatacacctcttttttcttttcttttttttttttttttttgagatggagtatcactctgttgcccaggctggagtgtagtgactcgatctcagctcactgcaacctccacctcccaagttcaagtgattctcgtgcctcagcctcctgagtagctggaactacagatgtgcaccaccacacccggctaatttttgtatttttagtagagacggggtttcaccatgttggccaagctggtcttgacctcctgacctcaggtgatctgcccgcctcagcctcccaatgtgctgggattacaggcgtgagccaccgcgcctggcctgtacatataactcttaaaatgctgccctgaccctggggctcactttcaaagatgtccacactctgtaggccaggaccccacctgtcccatacccttcctggcagccctgtccctgctacatcgcccttcagctacaccagctttctttgggtccctggaccacacctgataccttcccgcccagaagtgttatctctgtcctggcagttgctcaaccttttatggtccctaccaccaaggccatctgcttggttgacatacccaccccaactgtaattaaatcatccccggtgtctcctcactagacagctccacataagcacagctggtccttttagggctgtgtccccagcacctcccacaaaggaggatgcagttcatcaggatgggttggatgaacagcccattttacagatgaataaactgaggcacaggcaggtgcaggattttggcagcactgcacacctgtcctggctttgtcctcctccctggggaatgagcttggagcacccctctaggaactgggatgccagcctcttcccttgaccatcttggtccttgtcatgtgggccccagtaccaggggtggctttaatttggctgcccagggaggtggttcagggctgccaggacccctgaagtaggctctctgggctctgtcctttgccccccaacatggtgcctgtttctcctgcctcttcatgcagagtggccagctcctggcccattcagctctgagtttgagctcctgggcggagatttttgttgccttgtaactgggattcctagatccagcctccaccctctgattgccctaaggaggttttggggttttgttttgttttgtttgtgttttcgtaggatggtggcagtgattttgaggaggggaagaggaaggaagatacaagcaagggaagtcacaggctgtggtgcctaggcagaccctggtttgaatcttggccttaccactttttgcatgtaagtggtaggggcagcagatagctcaggacatatcttgggtttttttgtttgtttttgttttgagacatagtctcactctgttgcccaggctagagtgcaatggcacaatcttgactcactgcaacctccaccctcccgggttcaagtgattctcctgcctcagcctcccgagtagctgggattacaggcaccggccaccacacccagctaatttttgtatttttaataaagatggagtttcaccgtgtttgccaggctggtctcgaactcccgacctcaggtgatccacctgactcggcctcccaaagtgctgggattggccaggtgtggtggctcatgcctgtaatcctacactttgggaggccaaggcaggtggatcatttgaggtcagtagttcaagaccagcctggcctatgtggtgaaaccgcatctctactacaagtacaaaaattagccggacatggtggcacacgcctgtaggcccagctactcaggaggctgagaatcacttgaccctgggaggcggaggttgcagtgagccgagatggcaccactgcactccagcctgggtaacagagcaagactctgtcttaaaaaaaaaaaaaaaaaaaaaagtgctgggattacaggcttgagtcatcccgcccttcaggacatatcttttgaattttgaacctggtgaatgaatttttagatgacctcaggacagtcctcaatttccacatgacctcagtttttccagctttgcaaggggagtatgaaaccagccctgaagtcttgctaagaggattcggggagctcatagaagttgtgagttggttcctccattcgcctgggtgttgtaaggggcagggcctgtgtcttgcttgtggcctgccagggtagcagctcagtaagtgagatggtatctcactgtggttaggattcacatttccctgatgactagtaatgtttccgtgtaatttcttgaatgatcattcagtaacaataagtgtaggttgagtttgtagaatcaggttgacctcctcagcctcgatttccaaatggagaaagcagagatttggagctcctggtcagaggagcaggtcggtgctggagccaggactcaaccttaggttgtacctctgagcctttgaacacttgccgtttctattcctcacagcagccctttcagacggaacgggtgttaccagattaggaggagagtggccactgtattctcagtgcccagcccagggaggcagatctgagtggagttgctaatgaaacatggaaggtgcttgagagctaactggaagggagggaaggtgtgcattcctgcaccagggcctttgcatgtacttgttactttctcctgctggccagctggagtgtctggaaagatctgccttactcagggaagccttctcactcgcactctgcccagttaggaccactgccctctagagaccctatagaattacagaggaggccgggcgtgatagctcacacctggaatcccagcactccagcctgggcgacagagtgagactccatctcaaaaaaaaaaaagaaaaaagaataaaccccacacacctttgccttccctttgctttccctcaccacacccccattctccccgcctcccagcccctggcaaccactaatctgcctcctgtctgcgtggatttgcctgtcctggacatttcctataaatggatcatacaatctgtggtccttttgtttggcctctttctgttggaataatcttttccagggacatccatgttgtagcatgtgtcagaatttcctttctttttatagctgaataatatcccattgtatggactgaccatgtttagttggcccatccatccgcagatggacgtttggattgtttccacctttgggctattgtgaataatgctgctgtgaacgtttgtttacaggttttcaatgcaggcaaatgttttcgtttttcctgggcataaattccaggagtggaatcgctgggtcatatggtaactctctttaaccgtttgaggaaccgtcagactgttctccatggtggctgtgccatttgacattcccacaagcagtggaaatgggttctggatttctcatcctcaccaacttttttgattccagccatcctagtgggtgtgagatggtgtctcattgtggttaggatttgcatttccctgatgatgttttcttctaatttccctgatgactagagatgttttcatgtaagttatttatttatttatttatttttgagacagtgtctctgtctgtatcccaggctggagtatagtggcgcaatcacagctcactgcagccttgacctgggctcaacaacagatccaccccccaccacaccctccctagtagctgggaccacaggtgtgctccaccatgccggggtaatttttgtatttttcgtaagaggcagggtttcaccatgctgcccaggctggtctcaatctcctaggctcaagtgatccacacgccttgccctcccaaagtgctgggattacaggcatgagccactgcacccagcctcatgcaatttctttttccttttttttttttgagacagtcttactctatgccccaggctgaagtgcagtgccacaatctcggctcactgcaacctctgtctcctgggttcaagtaattatctggcttcagcctccctagtagctgggactacatacccacaccaccttacctggctaatttttgtatttttggtagacagggttttgccacgttggccaagctggtctcgaactcctggcctcaagtgatccgcctgcctcagcctcccaaagtgctgagattacatgagtgagccactgcgcctgacctcatgtaatttcttgagtggtcatttagtcattatacaaacagtgattgaagggcatgtgcccagcactgcagactctgctgcacagtcagatgaccctgcctttctggcatttccatgccagtaccctgaagagataccatatatgtacctggtgcttgcaatagctggcactcagaggtagcacactgtgtcctagccactcttccgagcacttaagcatattcagttactcttcaagtacatatgaataagtatgcctttgccccctcctctttgcaagggatagcgtgtggccaccctggtctgcagctagcttagcagatttgaccacatattgtaaaagtgagtctgtaccaggacagatagggtagagggctctgtgtggtttagcaccatggtagattccatcgtgcggatgtccctccagcaggggaggtctttggggccagggctaggccagcacccacatttgccgcctgaccccgtccctccgtctctgtctctccattcctccctgcccctcgtgcagccgctgccatggcccagacactgcagatggagatcccgaacttcggcaacagcatcctggagtgcctcaatgaacagcggctgcagggcctgtactgtgacgtgtcagtggtggtcaagggccatgccttcaaggcccaccgggccgtgcttgctgccagcagctcctacttccgggacctgttcaacaacagccgcagcgccgtggtggagctgccggcggctgtgcagccccagtctttccagcagatcctcagcttctgctacacgggccggctgagcatgaacgtgggcgaccagttcctgctcatgtacacggctggcttcctgcagatccaggagatcatggagaagggcaccgagttcttcctcaaggtgagctccccgagctgcgactcccagggcctgcatgcggaggaggccccatcgtcggagccccagagccccgtggcgcagacatcgggctggccagcctgtagcaccccgctgcccctcgtgtcgcgggtgaagacggagcagcaggagtcggactccgtgcagtgcatgcccgtggccaagcggctgtgggacagtggccagaaggaggctgggggcggcggcaatggcagccgcaagatggccaagttctccacgccggacctggctgccaaccggcctcaccagcccccgccaccccaacaggctccggtggtggcagcagcccagcccgccgtggctgcgggagcagggcagccagccggtggggtggcagcagcagggggtgtggtgagtgggcccagcacgtcggagcggaccagcccaggcacctcaagcgcctacaccagcgacagccctggctcctaccacaatgaggaggacgaggaggaggatggtggcgaggagggcatggatgagcagtaccggcagatctgcaacatgtacaccatgtacagcatgatgaacgtcggccagacaggtgaggtgccgtcctgtcccccatcccaccagccacccctgctcctcctgccactcgcgtgccactctctccctgcagccgagaaggtggaggccctcccggagcaggtagcccccgagtcccgaaatcgcatccgggttcggcaagacctggcgtctctcccggctgaacttatcaaccagattgggaaccgctgccaccccaagctctacgacgagggcgacccctctgagaagctggagctggtgacaggtgggccggtctcgccccagatctctcccctccgcagctttggagccggctggcctgggctgggctgggcagctggttaggagcccccagcacctcagtttccctatctgtgctgtagtgttggtaacagccaccctaagggtgggggcgttggtgagatggaggagctgatacagcaaggcctggcctctaggtttctggcttaaggggtcggggcgagcattggctattattgtttggccgcatgggtagattagctacttcccgggctcctgtgaaggccagctactacctaggttaggaatttggacagtcacaggggcgaatgcctgtagtcctagctactcaggaggctgaggtgggaggatcccttgagcccaggaggtcaaggctgcagtgagctgtggtggccactgcactccagcctgggtgacagagtgagacttcatctcttaaaaaaagaagaagaagactgtgtttggtccttgggtcagagtgcctaggtgtgagcctccactccctgttggtcctgctgagcttgggctcatctctagctggtgacagccagcgtgcccacctcacacaggcttgcggcacgactggccacacagcaggcaccccgaggatggtgaagcaaccctttctgtcctttcctgagcactgatgaggttgggggagccccaaggagcctcccctgactgcccttggtgggtagagatgtaggggagaaggtccctgggtgagttttcttgggacccagagcccagcagggagggcctggggtgttctgagatgaggcctggtatcatgggggctgtggcggtttgggggcaccccaggccatcctccggcttcctctcaccaggcaccaacgtgtacatcacaagggcgcagctgatgaactgccacgtcagcgcaggcacgcggcacaaggtcctactgcggcggctcctggcctccttctttgaccggtaaggcccttgccagagccccagggaggggggtggggtttccccatgtcccccccaccaccaacttgagcgctgactccctccatgtcccctgcccccaggaacacgctggccaacagctgcggcaccggcatccgctcttctaccaacgatccccgtcggaagcccctggacagccgcgtgctccacgctgtcaagtgtgagtgttggcccagctggacgaggcgtgggcccggggcacgcaggttgacgttttttcccagccttggctctcagagagggctagagttcagtgttgagaagcattctggggctcattctagccttgctgggaaaccggctgtgattgcttagagatttcttcgtgtttgggggatgcacgtgccgaagggaagccagggagcctgtgtcaggcaggagggtctcgaactcagggcagtctgggagggatgaggcagccagacagtgctagccactcgtcatggggggcatctagattttcaagtgaccactccccgttactaaattctggcaaatgatccgaatttttcaagaacacggggccatcccatcaaaaccaacacatccccacacatggctgaactcagtccggtgtagggttgggtgcacgtagtgtggtgtcctggccgcgtggcctcactcgtttcccctttgagagggagtcgcagatgctgtaggggagctggtgagtaggccttgtgggagtcacctggcccccgtgccaaggccgcacccaccctgccccacagactactgccagaacttcgcccccaacttcaaggagagcgagatgaatgccatcgcggccgacatgtgcaccaacgcccgccgcgtcgtgcgcaagagctggatgcccaaggtcaaggtgctcaaggctgaggatgacgcctacaccaccttcatcagtgaaacgggcaagatcgagccggacatgatgggtgtggagcatggcttcgagaccgccagccacgagggcgaggcgggtccctcggctgaagccctgcagtaacccgcccagcctcccgcggggccacacacttcccctcccaacacacacacacacctgccatcttggtcatgagctactgtctgtccctccccaggacccgcggtgggtgctgcatgttcccggccctctgcccctcctgtcctaccccctttccccaccgagagctgggccgggagaggaccgcagggcaggtggcgtgaggtccgtgttgccttctttaacacacactcgtgcagtgggggagttctggctccccaacctaacccctagccgtcatctccacactcaccaggcccaccaggggagggggctggcctgggggtcttgggaaggcccctccccaggccctaggccacctcgcggaagccttcagcctccgcccctcactgcagccccttgggacttgaggggggccccaggggttctcaggacccctcccaccacctcccagtgcttccacgtctccaaaagcgccttcctgtcaccctcgtctatccctgcgcctgggggctggggtaggcgaggccgtggggactacccattttatagctggggaaacaggctccgagaaattgcacaaccgacctcaggtggccggcagtggcgtgcctggtgccctttctcctcttccgcctctgttgctccctttggtcctctggggcctcagagaggcaggtcctaaaggagggggggtctcctgggggcagaccgagggtctcggaggatagaatgagaggtttccagggctggcagagtgtgtgcgtgtgtgtgtgcagaagttttgctttcaaacaaatgaagatacaagaggcagtaggacctgggttggaacccaggggagcagactggggggctgttgcccctccctccatctccccacacccaccccaccccacagcagggctcctggcccccacccccctgtacataatttttaaaacctttttttagcgaatgaaatattgaagtataagattccttttatttttcaaaccaatggggctgtgtctattgtccccctcggtccccaggggtggggggccttggaaggcagggcggtgttggggggctggggggcaggctgaatgtgtgtgtgtgggtgtgtatgtgtggagtgtgtgtgtgtgtttccatggtaggactccagtcccagctgctgcctaggctcctgtgggtcctgtgggtccccctcccctgttcaccttccccaacagggctatagtttaagggtgtcccaggccttggctggttggctgggcccagctcctgggggctgggcagggcagggcagggccgggtccacttccattgttagcagttgtttgcagaattttctcttttaccattcctctctttttgttctcgcccagagtgggtggttttttgttgttgttttagattttcatgtgaaggcagttttttttcttttttaactccccatccccctatgcagggtgtcatttcaccatccacatccacatccttgtttgtgtttctggccctcgtcctccctgcctctcatctgcctccccaacccccacctacccactgctcccaggggtctctccaggggcagggggattttaggagatggggtgggggccagcccctactggacccttgtaatctgatttggagaccatccccccgatgggaccagcagccccgccggcccactgggggtccctcttaacatctgcttgttgcgggggtcagtcatgagtgccagggtctggctggggtcttggcactgtcttcctggccggggcctgaaaccttagcccccagccggcctgagtgggggatattgacacccccagctaaagcacaagcaccttagtcacccctcctctccccccgcctcctggcctgccaccccaccccagcgtttaccccaaagcacaatgccctggtcacttggcaagcggctgggcctgacggaggccgaggggcagaccggggctccagccagacccctgaaaggaaggtgctcccccacttccaggccttagttggggtgggggggccagctcctgggcctggggtcttctcacccccacccccttgtcctgggtaggcccctgcctgcccctctctgccttttcctcgggtgtccctcctcgagcccctgtggcattggcttgggtggcagagcccacttgtttcagggaccccaggaggtgccccctggctcccaggactgtgtgtgggtccggggggtgggggggtggggagaagggtcgggcagggggtgcaggggaggaaactcctcaccaggagagccaaagacagggttgtgccttaccccaggagccacccctgtaccccccttgccctgccattcaccctccacccctacccctgggcggcctgctgctttttccttctcttcctcccctgccctgagctgcatggttcccccaccctgggcagccaggaaggaatctgaatggagaatcaccaaccaccagagaaaaaagactgtggggccctcccctgccaactccccttccctggccgcccactcaacccacacctctttcacgcaggacaggctgcccaccctgtccacgtgaagtgccaacgccctccccaccctgggccgagcccccacccctccctgggcccccaagtgagattgcacatttaactactgtaaggagaggagcggcgttggcaaatgtgaaccatgagaatatcagtgatactgatgagaataaactaaacgcctttgtaacagccttgccgcatgctcgttacttgggggcccagggaggaacacacacctgcattgtgcccagcagacccaggttgctgactgcaaactgacagcctccgattctaacacgcatgcaagttaccccaacagatacagataacgcaacatatgagctggtcctacacacacacacacacacacaatttttttttctttttttttttttgagatggaatttcactctgtcgcccaggctagagtggcgcgatctcggctcactgcaacctctgcttcctgggttcaagccattctgccttagcccccccaaatagtggggattgcaggcacccaccaccatgcccggctaatttttgtatttttagtagagacagggtttcaccatgttggtcaggctgggctcgaactcctgacctcaggtgatccacccgccttggcctccccaagtgctgggattacaggtgtgagccaccgcgcccagcattttcttttcttttttttttttgagtcggagtttcgctcttgttgccaggctgtagtgtcatggcgcgatctcggctcactgcaaccaccgcctcccaggttcaaatgattgtcctgcctcagcctcctgtgtagctgggattacaggcatgcaccaccaggttcagctaattttatatttttagtagagatggggtttctccatgttggtcaggctggtctcccaaagtgctgggattacaggcatgagccaccaccacacccagcctgaaaaaatacttttaattagctgggtgtggtggcatgcacctgtactcccagctactctggaggctgaggcaggagaatcacttcaactgggaaggtcaaggctgcagtgagctatgatggcaccactgcactccagcatgggcaagagtcagatcccatctcaataaaaaaaaaaaagggagctgtggctctgtcaattttacagcaacactggctcactcggtgcccgcctgtgccgtggctgatatgccaagccccagaaacacatcccatacacacacactccacgccgcattcagaagagcattcatgcattaaaagaacataaaagagatcggcagggcgcagtggctcatgcctgtaatcccagcacttcgggaggctgaggcagatggatcacctgaggtcaggagttcgagaccagcctggtcaacatggcaaaaccccatctttactaaaaatagaaaagttagctgggcgtggtggagtgcgcctgtaatctcagctacccaggaggctgaggcaggagaattgcttgaacctggaaggcggaggttgcagtgagccaagatcgcaccattgcactccagcctaggtgacgagcaaaacttagtctcaaaaaaaaaaaaaaaaaaacgagatcacaaaatttaaccgatattggaaatatctgggtgaacaagagggtcccaagaatatgaaaggacaaatggttctatcaagtaggaaaaaccatggatgcaccgtgggtccccatagactcaaagataacacaagattaaagtaactgggctgggcacggtggctcatgcctgtaatcccagcattttgggaggccgaggcaggtggatcacctgagatcaggagttcaagaccagcctggccaacatggcaaaaccacgtctctattaaaaatacaaaaattatctgggtgtggtggcgggtgcctgtaatcccagctactcaggaggctgagacaggaaaatcacttgaatgcgggaggtggaggttgcagtgagacgagattgcgtcactgcactccagcctgggtgatagagcaagactctatctcaaaataaataaataataacatagaagccagtcatgatggctcacacctgtaattccattactttggaaggctgagagaggaggatcagtggagcccaggagtttgagaccagcctgggcaatatagggagaccctgtctctacaaaaatgaaatagccaggcgaggtggcatgtgcctgtggtcccagctacttgggagactgaggtggaaggctgccttgagcccaggagttccaggctgcagtgagccatcattatgccactgcactccaacctgggagacagagtgagagagaccctgtctcaaacaaacaaacccaaaataggccaggcacagtgactcatgcctgtaatcccagcactttgggaggctgaaataggcggatcatttgaggtcaggagttcaaattcaagaccagcccggccaacatggcaaaaccacatctctactacaaataaaaaattagttgggtgtggtggagcattcctgtaatcacagctattcaggaggctgaggcatgagaaccgcttcaacccaggaagcagaggttgcagtgagccgagatcacgccattgcactccagcctgggcgacagagcgagactctgtctcaaaaaaatataaataaaaataaaaagatcaagagaacctaaaccattaaaaaaaagactcgcatgggtgcggtggctcctgcctgtaatcccagcactttgggaggctgaggcaggcaaatcacttgaggtcaggagtttgagaccaacctggccaacatgaggaatcccatctgtactaaaaatacaaaaattagctgggtgtggtgacacacacctgtaatccaagctacttgggaggctgaggcagaattgctggaaaccaggaggtggaggttgcagtgagcagagattgcaccactgtactccagcctgggtgacaagagtgaaactctgtctcaaaaaaaaaaaaagaaatccggaacacgcacatgtgcacacacacactggagcacttgtgcaagcagtggcttagaatgggagtcccaatcagggctcggtcacgcatttgcagtcaacacacaccacacgacacaaatacgtataaaaaaggctgacattttatttccaggttggcacgtgtataaggcacaggggcaaatggctttggggtcctggaactggaaatggagacaggtgtgtctcaggtgtccctgcctccaccaccccctaagtgcacttgagacaggaccagtggtggtggttccagcccagggtcctgaagggtcccactggctctaggggagagccatggggacagctccccaggcgggaccctctactctccagctacccaggagggaccctctcctcctagggggcgaggccagctccaaagtgcttggtggctccccaggcttaagggaccagcctgccagggagggctggggtcagagagagaatagtaagatgagaacgaggagaagcacccccactagcacggcgatggcacaccactgtcggcggtctgggaacgagaaggtcaggggtcacggggagagggtaccacctacaacctgcccccaccaggactgacccctcccctgaggggactcaccactcgtcatgtgggatactttggccaacttcctgaggaccccgtccatgcgggactgggtgtggtccatctcttgggcgaaggcatccagcatgctgccaagaacaggatggcatcagccccagatggcccagacacaccagggtggccgagagcccctggcccacccccagggtcctggcctcacatgccctgctcgtccagctcttctccaacgcggccggacatgtgcttcagaacctggatgctcccagacaccatctccagctgttgatcctgttcatccatgatcagctgcagagcgaaggggtgggagatgctgttgaaaacgaccccagaaggccaggcgctatggcttatgactgtaatcccagcactctgggaggccgagacaggcggatcacttgaggccaggagttcgagaccagcctggccaacatggtgaaaccccatctctactaaaaatataaaaattggccaggcattgtggtgggcgcctgtaatcccagctactagggaggctgaggcaggagaatcactggaacctgggaggcggaggttgcagtgagctgagatcgcgccactgcactccagcctgggcgacaaagcgaaactccatatcaacaacaacaacaacaaaaagggaccccagacctcagatcagtctgcaaggctctcccctcccaagatccaccccgctggccccaaaacctgctgtgtggcctgctgctcctcgatgtagcgagatgtggccgagactgcgctggcatccagcaggtcgctgggtgacttctgggcagctggcttgcctgcgagtatctgcaggggcacacaacataggctcagggagagaccccaactcacagcggggcctgtggggcaaatccccacggtggtaagtcaggggggcagactctggggcaggacagcctgcattccccactcaccacttactagcaaggtgacccagagaccccatcatttggcttccttgtgcctcagtttcctcatctgtaaaatgcagagagcaggatggggcatggtagctcatgcttgtaatcccagcactctgggaggtggaggtgggcagataacttgaggtcaggagctcgagaccagcctggccaacatggtgaaaccccatctctactaaaaatacaaaaattgggccgggcacagtggctcacacctgtaatcccagcactttgggaggccgaggtagatggatcacgaggtcaagagtttgagagcagcctggccaacatggtgaaatcccgtctctactaaaaatacaaaaattagccaggcttggtggcgggtgcctgtaatcccagctactagggaggctgaggcaggtcagaatcacttgaacctgggaggctgaggttgcagtgagccgagatcacaccactgcactccagcctgggtgacaggttaagaccttctctcaaaaaaaaaaaaaaaaaaaaaaattaccgggtgtggcagtgcatgcctgtaatcccagctacttgtgaggctaaggcagcagaatcgcttgaacctggggggcggtggttgcagtgagctgagatcgcaccactgcatttccagcctgggtgtcagagtgaccttgcctcaaaaaaaaaaaaaataaaataaaatgggaagagctagaatccgtgtttcctgggttgaaatgaggatttaaagaattaattgatgggggacacttacagcagtgcccaacacatagtaatgctagtaaatgtcacattttactatttgtttatttttggggggattttagctgggattacaggcacctgccaccacatccagctaatttttgtatttttactagtgatagggtttccccatgttggccaggctggtctcgaactcctgacctcaagtgatccacctgcctcagcctcccaaagtgctgggattacaggcgtgagctaccatgcctggcccaacagatgtttgtttgtttgtctgagacagagtcttgctctgtcacctaggctggagtgcagtggtgtgatctcgcctcactgcaacctccacctcccgggttcaagcaattctcctgcctcagcttcccaagtatctgagattacaggtgatcaccaccacgcctggctaatttttgtattttttgtagagacagggtttcatcatgttggccaggctggtctcgaacgcctgacctcaggtgatccacttgcctgggcctcccaaagtgctgagattttaggtgtgagccaccgtgcccggctccaacagatgtattttagagtttggacttgaattcccccaaggcagcacatctggaaggcacgtgggcactgctatgggatgacaaactgggaggagcctcagtcccccaccctccccgaccccacgtacgcttatgagggagagagaaaggctggtggttctcaacatatgaaaaatatcaacagagaacaccaagagaaaaagtggactgacagaggtggttgggagaaacacagaaacacacacacacacacacacacacacacacacacggcaggcacattacagaggaaactagcagatattaggatatgaggggggaaaatgcagatacactcagaggccaagtgcacgcacccaaataggttaggtgcatgcacagatgaaaaggcgggggcggatcacctgaggtagggagtttgagaccagcctggccaacatggggaaaccctgtctctactaaaaacacaaaaattagctgggcatggtggcacactcctgttgtcccagctacccaggaggctgaggcaggagaattgcttgaacccggaaggtggaggtttcagtgagtcaagattgcaccactgcaccccagcctgggcaacatgccaagactccatctcaaaaaaaaaaaaggaagctggccgggcgcggtggctcacgcctgtaatctcagcattttgggaggctgaagctagtggatcacaaggtcaggagatcaagaccatcctggccaacatgatgaaactccgtctctactaaaaatacaaaaattggccgggcgtggtggctcacacctgtaatcccagcactttgggaggccgaggcaggtggatcacgaggtcaagagttcaagaccagcctggccaagatgttgaagccccgtctctactagaaatacaaaatttagccacgcatggtggtgggtgcctgtaatcccagctactcgggaggctgagacagaattgcttgaacccgggaggcggaggctgcagtgagccgagatcacgtcactgcactccagcctgggcgacagagcaacactccgtctcaaaaaaaaaaaaaaaaaaaaaaattagccgggtgtggtggcatgtgcctgtattacagctactcaggaggctgaggctggagaatcgttgagcccaggaggcggaggttgcagtgagccgagactgcgccactgcactccagcctggcaacagagtgagactgcatctcaaaaaaaaaaaaaaaaaaaaaaaaaaggaagttatgtgcgatggctcacgcctgtaatcccagcactttggaaggctgaggcaggcagatcagttgatgtgaggggtttgagaccagactgaccaacatgacaaaaccctattaaaaatacaaaaattaggccaggcgcagtggctcatgcctgtaattccagcactttgggaggctgaggcaggtggatcacctgaggttgggagttcaagatcagcctgaccaacatggagaaaccccgtctctactaaaaatacaaaattagccaggcatggtggcgtatgcctataatcccagctactcgggaggctgaggcaggagaattgtttgaacccaggaggcggagattgcggtgagccgagattgcaccattgcactccagcctgggcaacaagagtgaaactccatctcaaaaaaaaaaaaaaaaaaatacagaagttaccctggcatggtgacgagcacctgtaatcccagctacttgggaggctgaggcaggagaatcgcttgaacccaggaggcagaggttgcagtgagctgagatcaagccactgcactccagcctgggcaacagaacaagactctgtctcaaagaaaaaaaaaagagtaaaaggcaggcatgcgtcctggaaacaggtgcacacaggacaaatggcatggaagcagaaaggagataggtacacaggcccccagccctctcctgcaacaggaaaccagtatagacccagaggacacagtagagaggaacccacggacatatacacatagagaggttcaggtgcacacaccgagaaagtgcaggcaggtagacagcaagaagataactgcccacagagaggacgggcactgtcgcaaaagggacaggtgaacacgcacagagggatctggcttggttacccccaggggctcaggtgggcagggtgggtcaggaaggcttacctctctgttattcctctccaaaaatgctacggctgttgggctgaccatatggtccttcatttcctggaggtaaggacagcattagggaggaaagacactcaggctgggcgcggtggctcacgcctgtaatcctagcactttgagagaccaagccgggtggatcacctgaggtcaggagttcgagaccagcctgatcaacatggtgaaaccccgtctctactaaaaacacaaaacttagccgggtatcgtggcaggcacctgtagtcccagctactcaggagactgagacacaagaatcgcttgagcctgggaggcggaggttgcagtgagccgagattgcaacactgtactccagcctgggcgacagagcgaggctctgtctcaaaaaaaaaaaaaaaaaagaaagaaagaaagaaaaaaaaacacactcaaaccttcccccactccccgcctgcaggacctttcctgacctggactgcctctcgcatccgctccacgaacacctttctctcctgcaggtccccggctgggagcttgaacttgcctgggttggcttccactatacgtgggctgagagtcaagggtcaaggccggagccagatatcatccccgtccctaggggtccagccctacccgaaggtgggctgccaccgcaatgggctctcccatgccaccctctgccacaaagccccaggatatcgatggtctcttccaggtcctcgaggtcccactcgatgctgcgcaggccattccgcagctcattggtcgtccagtccagctcctcgcgtccgaccgccgcgctttcctgcaggagctcgcaccagcgctggtacagcccgcgggccgtgttcaccgccttctgcacctcgctgcgggcaggggcacggcgggcgcggctgggggcaggcggtcctcccgcctgcctctgcccccgactgcaaacccaaacgcatgggggactccggagacccctatatacccctgcgtgcgcctcccactctgcaccccgacggccttgcccagcccgccgggcacgctggggccggcacccgggcactggctggcttgggtacagagcaccctccgccctcccccgtcgttgtcactcaccctcggactacaaaaaaggggtcttcgagagacatgtcagtcccttcccccccaggccgaacccccctcccggcctgggttcgcgggctggttccctcccaaccgaggagaacgcgccgccacccccgcccccgtcacgccaccatcgagagccggaccgccaggggagaaagagaagcctcggaggcccgacgtgcggacacttccgccctctcctcagccatcttggttgtgggcagaggcagcttccggtgcacatgcccccgccccttagccctctcgtgccgcaccgtagggggcggtgtcggagttctgtctgggcctattcgggtccgagttcggaatttcggttcaaggcccagttcctcggattgttcctgcgcaacttcagtttcccttccaggcacgggcaatgtaaataatgatagcctccctcatctctggcggctgggtattatggctggggaaggggctcattcgattcgttgaagcttttcatggactccctgagctggcacctgggagatcgtcccatcccagggtcccgagtgtcaggtttggctagggtctgggggagaggtggtcctcccttctccctgcgggggcgcggtgaggagcgggcctgctcctccggggagttctgccgcattctcccaatctctttcctgagaagtggcggagttgggggcacttcgaggtcgccttggggcgaggtggtcgtgagggggtcccagatatgccagcagcggggggaggtcacctttgagaaagtgcgtggaggtgggtttcttcagaagcgcggagtctttctgggtgcgagcctgggggtagcgggtggtggctttgaggatggtctccaggggggccctctgtgtgtggggtctccgtctgggtaggggccaggaatatcagcggagggactcagggtcgtccctatgtgtgacagtggcgctgtgtgttggggagcttcgggaaagcactttttttgagtgatagggggcctggtctcccctggagggtgggcgggttatctgagggagtcctcggagggtcgcccccttgcgcgtcagagttgctgcgtggggtctcagagatagcgcctgggctggggaaatcattgtggggtctccgtggtaaggttagcggggtggggacggcctgcgtcttcggcaggtcgtcgcagtctggcaccatcgttgaatggggacgagtttgggaagggtattttaggggggaataacttttgagttcccagcgtgcgggggaagggcgggacgggagggtgtcccaaggcctgagaagatcagtgtggggcaggggtcaggaataacctgggagggggccttgtatgggggaaataattgggaagaggagagatgggatgaagggggcctcagcgggtcgtctcctgtgtatgcagggtcgttctgcagcgtctctgggagatggcgtccctgggagccctcaggtcgcccctacccgctgcggggtgctttcctggcgtcacgccttcctggcccctggagggaaggaagtgaaactctcctcttcccccacccggctggaatgcgagtcaggaagcctggggctccagcctgctccggctgcccgggtcggggatggggaggggcgtggccggagcgcaaagccccgcccctccgcgccccccccccggaagccccgccgccggccgctaaggcgatcacgggccctgtcctaatatgggcaaccggaagcggcccgcgcgactgccctacgtcactccgtccaaatttagttgtggaagtcagcgggcgctggtggcgggaaggcgccgcgagccagtgcgggcggaaagggggcggggggcgcaccaccccttaaagggcccgcaccaggaatgaatggagccattcgaacaattctgcatcctatttttggaggaagtggaattagtatttcttggagagacggcgcgtagcggagggtagggcggagattttctatctgctctgtctctgcattgctgggtttccagctcccaacctaaccccgcctccccgaacgcggagacggaactcggcccccttgtttggggggcggcagccacgtgttcacggggactgtcgtgcgcgccgggttcgcagccgtgcgagctctgaacccacccgtggagctcctgtcgcgggaaactgcgggggaatggcttggtacgaatcacgggaacccgtagcccggggcgggtcaccgcctacaagcaagggctggcgtacgctagagaccgaagagctggaggccccagtggccccctttcacagcagtagcaaatattgtttgtttagtaaatattggcctagtgactctgccttggtttccccacttgaaggaagcagatagaacagtatcctccgaggagtggaggctggggatcggtgaattattgataaaaggagagctcttaacctagcctggcacgttgtaagcgctgttagcatgattattggtgcagaaaacactcattagacacacctggtaaatgctaagaacagtggccacaggggatgttcaggctggaaccagggtcttcccctgtgtgaagggaaacttgctgcccacgacccactggggcctccagacgggagcatgtgggtaggccgtgagctccacccccggcccccctcccttgggccaaggcgctgatgcatcggcggggctcagagaaaggagcccacccagaaagctcagcgtggagtcgggggacgctcctcctcgccagggttcccgtcccctttccctgctgggtaaatcgcattctgtctctttaaggagtgtttggccgcgacgagttggaaagcccggatgcgtccttcggttgggcggggtgtctcagtgacgtcactgggggtataaaagggcctgggtggcgggcgcctgggcagagcgtcctagcagtgtcactgcgtgggttggtttgtgtagagaggcgtgagcgagcccgttgtccggagtgcacctgctgcctgttctgtccctcccgggagcccccgccgctgtcgccgtcgagtcgccatggaagtgcagaaagaggcacagcgcatcatgaccctgtcggtgtggaagatgtatcactcccgcatgcagcgcggtggcctgcggctgcaccggagtctgcagctgtcgctggtcatgcgcagcgcccgggagctctacctctcggccaaggtggaggccctcgagcccgaggtgtcgttgccggccgccctcccctctgaccctcgcctgcacccgccccgagaagccgagtccacggccgagacagcgacccccgacggtgagcacccgtttccggagccaatggacacgcaggaggcgccgacagccgaggagacctccgcctgctgtgccccgcgccccgccaaagtcagccgcaaacgacgcagcagcagcctgagcgacggcggggacgctggactggtcccgagcaagaaagcccgtctggaagaaaaggaagaagaggagggagcgtcatccgaagtcgccgatcgcctgcagccccctccggcgcaagcggagggcgcctttcccaacctggcccgcgtcctgcagaggcgcttctccggcctcctgaactgcagccccgcggcccctccgacggcgccgcccgcgtgcgaggcaaagcccgcttgccgcccggcggacagcatgctcaacgtgctcgtgcgggccgtggtggccttctgaggaccccgagcggcgctgccggagcccagagcgcgcgtcgaaccgtcggcccgagggcgcagacctgaggcgaggccacccccctccatcctgggggaagcgcccgcgaaaaccgtggagagaagccgccgcccgggctgctgagaggcccggagagggactctgtccccggggagccatcgccttcagtgtgcagggacggcaccgaggagtctgagccgggggcgcgggcgccttccgcagagacctgcgcccacaggtgctgtcttagtggactgggacgtgaacctttcgctctccttctggactgggagaagggaggcttgggtgttgtgttttttgttttgtttgtttgtttgtttttaaagatctcctcagggtcggacttcattttgtactgtgggctgtgctggccctttcaaggtttttcaagagttggttttgcgtttccaacctcggagaattccaggcactccccttccccctccgctgacatacttgtataagcggtcatcgttgcgtcatggggcaggcgtggggagcttcctgtcgccttgcgtgggtgtggggcctgggaggaggtcctggggcgtgcacccgccctgggcagtggggaggagagtggcctgagttacttcacccccgcgtgctgctggttaatgtcccgcgtctctgcaccttcgggtgggagcggggactgatctactttcacattctcaagtttttctcatctgcattagaggtgcccagtaggttcccaggttccagcgtgcccctccctcagacacacggacacaatcagccgagaagttcctggtctgaatcacgagaatgtggaggggtggggggtgtcagtggaaaggcataaggctgagctgagaccagttgctggtgaaactgggccaatctggggaggggaacatccttgccagggagtttctgagggtctgctttgtttacctttcgtgcggtggattctttttaactccgtctacctggcgttttgttagaaatgtcagataggaaaataaaaaccatttgagtaaaaaagccggtgctgtctggttttctgctgtggtgggggaggggcggggttaaagcgtcaggggctggcagccgctcgctggggccccaagaaccggtctgaccggttaccacgtgggcgagagagggttgggcccccttttccttgcccgggcattccctaactggtggagccccgcctcccccagatttgggggttcccttgaaattgtcctacaactccgggacagggagatcggggctttctgagttgagacaatagtgctaaacacactgccccaagcggagctggggatcgattgcacgcactttgaagccttgaaaggtggtagatctcgcccccaccccctagaccaaactgaatcagctgtggccggggccctacagtatcaggtggagctgagcgggtgagctttgaagggctctttagtccccagttcccgtatcttcctcgaggaatcgttgtgtgtctcaggcagggacgtgcagcctcagtttcctcatctgtgaaatgggcctctaagcagcttctccacccggcattaggtttttaaaaatgcccattagagccctagttattttcttgggtcactccccagctctagaataaccaccccgaaacgagaaagccctttcaatataccccacgtaggtttaagagtggggttgtgggcgttgccccagggcgaagggagggggcctgtcgggaagacaaaggagtcgcaggtgcggggagtggtggcggcggcaggcgccgggaaagcgctcgccccgccccgccgacggctggctctgccgccgcaggcttcccatgaccccaggggaactgaccccgtggccacagggtagaaggaggggcaagccggcctcagaacgtctgctggtggaatctgggagctttggctcccctcccgcccaacccacaccccctttcctctcctgtgtggattgtgaaggagagcttctcaccgttctccagccaagctcgcccccacggctgcctgattccttcctgggaacacgtggggggacttttaaaaggcgccacctactccgagtcctgacccacccaactctcccaggggacgtgggggcactggagccccacaccgcaggcggtagctcaatgcacccgcgtcggagttcctcccccgcgagcgtggcaaggctcagggaagtcccgggcccctggggagggggccttgccgcgcatcctgtcgcaggaaccgccgggcccttccttccgcgggaagcggcttggccgacccccgcccccgcccgggcctcttgggggtttccggtgcccggccaccgtggggctggggactgaaagtgatgggactgaagatggggctggaacaaacacactacagacacatccccttaagacacacccatccccaagaccccactggacccatcagaaaaggcagcattgaaccttgtcacagcaaataacattggtgaggcctggactaattgattggacaatggctgtgaaaactaaaaaggtcacccatcctgtgaccagcaggttccagcagggaaccccaagcctgctgcaggagactccagaaaggtgtttgctgctggcttgtactaaattggcacaaactgcaaacagcacagcctacatgcccatcctcccagatgggtcctccccagaggataaaaggccggagccagacagaactacacacacaggccacacagataattcggtaccagaaacatgatgctgagtgacaaaggccagctgcagaagtcaggtaagaagcacatattctgggccgggcatggtggctcatgcctgtaatcccagcactttggaaggctgaggtgggcagctcacctgaggtcaggagttcgagaccagcctgatcaacatggtgaaaccccatctctactaaaaatacaaaaattagctaggcaaggtggcaggcgcctgtaatcccagctatccgaaggctgaggcaggagaatcacttgaactcaggaggcagaggttgcagtgagccgagatggtgtcactgcactccagcctgggctacagaggaagactctgtctcaaaaaaagaagaagaagaagaagaagaagaacatattctggagggagggaaacaaccaggtctactttcgttttcttgctatgcatccttgagtgagtcacttgacctctctgggcctgtttccccaaccgtatactggggacaataatagtccctgccttttaggtttgttgtaaggattgagattacacatgtaatccttacaacaaacctagcagagtgctggcacgtagaaaatgctaaatgtgctgggtgccatggttcatgcctgtaaccccaaaaatttaggaggctgaggtgggaggatcacttgaggccaagagttttcagtgcaatcatggctcagtgtagccatgtagcctcgaactcccagactcaagcaatcctcctacctcagcctcccaagcaggttggaccacaggctcaggcaccatgcacagctaatttcttttttttttctttctttctctttttctttcttttctttcttccttccttctttcctttttctttctttcttttctttccctccctccttcccttcctttcttcctttctttcctttctttctttcaactagagtctctctatcacccaggctggagtgcagtggcttgattacagttcactgcagcctcgagctcctgggctcaggcaatcctcccacctcagcctctggagtagctgggactacgccaccacacccagctaatttttcttttttttcttcttctctctcttttcttccttgtctctttcttttcttttcttttttgtttttgacagagtctcgctctgttgccaggctggaatacagtggtgcaatctcggctcactgcaaccctggcctcccggattcaagcagttcccctgcctcagcctccgaagtagctgggactacaggcgcacaccacgacacctggctaattttttttttcccaccggttgtcaaatgaccctttattgaaatatttttctttgtgcttcttaactagctgggcatttcacagcaccactgtgggtttttctggttttttggggtttttttttttgagtcggagtcttgctctgtcgctcaggctggagttcagtggcgcgatctcggctcactgcaagttccacctcccaggttcacgccattctcctgcctcagcctcctgagtagctgggactacaggcgcctgccaccacgcccggctaatttttttgtattgtatttttagtagagacggggtttcaccttgttagcaaggatggtcttgatctcctgacctcgtgatctgcctgcctcggcctcccaaagggctgggattacaggcgtgagccaccgcgcccagccatcaccactgttgatgtcatctatgatgtcacgagggtggcggccatcaacattacggcctacagactgggcagtccccaggatctctttgatggttccagagagttctctggctaaagatcggtgccacatctgtcgagtaatgttgacgatctcatcaaaagtgatattcccattgtgtctaatgtttttctgtttctttctgtctcttggtggttccttgagggctttaatgatcagggcagaggcagaaggcaccacctcaatctgggcctgtctgttctgaatggtcagtttcactgtaatcctcaggcccttccagtcaccccattgccttggcaaggtcattaccaagcttttttggagacagacccagggggccgatcttgggggctagtgcagaagtggcacccccttcaccccgagtgcacctcaggtatacaaatttgatctcgttggggttgaactttggcagcatggtggaggtgattggttttggaaaaacctggattctggacaaccgaagaaagctgcaccttgggctcctccaagccgaaagcccagctaattttttttttctttttgacacgaagtcttgctctgtcaaccaggctgcagtgcagtggtgcaatcttggctcactgcaacctccacctcctgggttcaagcaattctcctgcctcagcttcctgagtagctaggattacaggcacccgccaccatgcctggctaatttttgtatttttagtaaagacgaggtttcaccatgttggccaggctagtttcaaactcctgacctcaggtgatccacccacctcggcctcccaaagtgctgggattacaggaatgagccaccgcacctggccgaaattttttgtattttagtagagacggggttttaccatgttggccaagatggtctccatctcgacctcgtgatccgcccgcctcagcctcccaaagtgttgggattataggcatgagccaccgcgcctggctctttcttttctaacagggtcttgctctattgcctaggctggagtgcagtggcacgatcttggctcactgcaatatcttcctaacaggttcacgagattctcccacctcagcctcctgagtagctgggattgcaggtgcacaccactgcgcctggctaatttttatattttttgcagacacagggtttcaccatgttgcccaggctggtctggaactcctgagctcaagtgatctgcctgcctcagcctcccaaagtgctgggattacaggcgtgagccactgcacctggacgtatttattttttacttaggatttgtgccctaactcagaagttaattctgttaattctaccaatgtccagcctgagcctgaatgagtgaatgaggttgttttgggtaaacaggtgttacatgcttaatgtttatcatctcattaaatcagtggcttctacatgactcttagaatttctcaaacctcagatggttgaggggtcaggatatttgtgatattttcataactactgtactattattattatcatttatagacagggtcttgctatgttgcccaggctggagaacagcagcgccatcatagctcactgcagcctccactgcctaggctcaagcagtcctcccacctcagcctctgcaggagctgggaccgcaggcctgtgacaccatgcccagctaactgtattcatgtaatagttttctttgcgttaacccacttattaatcactctccctatttagaaagtaacagttttttaaaaggttacaatgaaaataaaacaatgtcaaaagatcctgctgaaacagtaacaggtttaatagtttcaaagagagattagccagccttaacgacacattgtttccaagggaagaaaactatgcttgggctgagaagggggatgcaagttgacaagggagaaatttggagagatccagtccacgttatttaaataacattgaattgggctgggcgaagtggctcacgcctgtaatctcagcactttgggaggccgaggtgggcggatcacctgaggtcaggagtttgaggccagcctagccaacatggtgaaacatcacctctaataaaaatccaaaaattagccgggcatggtggtgagtgcctgtagtcccagcgacttgggaggctgaggcaggagaattgcttgagcccgggaggcagaggatgcagtgagtcaagatcacaccacggcactccagcctgggcaacagagtgagactgtctcaaaaaaataaataaataaataaataaccttgaattattttgccacactgtcccagaatatggaaaattctgcttctggaagagggacaaactcctatgatgatctgcaaggccctgcttgatctggggccatcccatctctggatgaatcatgcatcaccctctggccacatggacctgctttttgttcctcatacttccacagccttctcagccacatggcctttggatatgccgtgacctcctgaagatctttcagcttccttgctcacctagtgaagccagctcagctcaaggggcaaatcctcagggaagtgttccctgtctaaccctcttttggcctaaggactgctttattttattttttatttttattttttgagatggagtctctctctgtcacccaggctggagtgcagtggtgcgatctcagctcactgcaacctccacctcccgggttcaagtgattctcctgcctcagcctcccgagtagctgggattacaagctcccaccatcacacctagctaatttttgtatttttagtagaaatggggtttcaccatgttgtccaggatggtctcgatctcctgatccgcccgcctcagcctcccaaagtgctgagattacaagcatgagccaccgtacctggcctattttattttattttaattaattaatctatttttgagacagggtcttgctttgtcgcccagactggagtgtagtggcatgatccaaggctcactgcagcctcaaagtctagtgcttaagggatcctcccatctcagcttccagcatagctgagaccccaggcacacaccacgatgcctggctaattttttattttttttgtagagatggaatttccatgttgcccaggctggtgttttttatttatttatttaaccagtctctgatgggaggcaagacccctatatttgacactcggatcaagagctactttatttaaaacatttggccaggcatggtggctcacgcctgtaatgccaacactttgggagaccgaggcaggaggatcacgaggtcaggagttcaagaccaacttggccaataaggtgaaaccccatctctactaaaaatacaaaaattagccaggcatggtaacacgcgcctgtagtcccagctactccagaggctgaggcaggagaatcgctggaaccttggaggagaaggtttcagtgagccgagatggcaccactgcactccagctgggcgacagagtaagactctgtctcaagaaaaataaagagaccaggcgcagtggctcacacctgtaatcccagcactttgggaagccaaggtgggcggatcacaagttcaggagctcgagaccagcctggccaatatggtgaaacctcatctctactaaaaatacaaaaattagccgggcgtggtggcaggagcctgtatcccacctcttgggaggctgaggcaggagaatcgcttgaacccgggaggcggaggttgcagtgagccaaggtcaagccacttcactttagcctgggcgacagagcaagacttcatctcaaaaaataataataaaataaatttttgcggggctgggagtggtggttcatgcctgtaatcccagcatttttggaggctgaggtgggcggatcacttgaggtcaggagtttgagaccagcctggccaacatagtgaaaccccatctctactaaaaatacaaaaattagccaggcgtggtggcgcgcacctgtagttccagctgctcggaagggtgagatgggagaatcgtttgaacccggggccggggggctgaggttgcagtgagctgagatagcgccaatgcactccagcctgggtgacagtgagactcagtctcaaaaaaaaaaaaatttttttttgttaatacttatcacaagtgcaattttacctttgtagaattaaaccgttgtttctgagttagtttcctcttgtagcctactgcctccaagtctagcagatggttaagcggtttttgtgaatgaatgatgcctttgcaaccttcgtttgagatctgtcctcttaacgtccactgtgtatatatgaggaaacaggcccacagagtttcgctctgcaagacagcaagtaaaggacagctctagtcgggtcctctatcccgaagcctcctccccactctgccctgccctgccgtgcaggacccaaaggaagggcgccccagttcagcctctgtagatctgggaaagggccgggccacaggtcgggaccaatccagaagcagcacccagaccggtttacccggttccaggaccttgggcgaagtccacccgcccgagggcagggacgacgcaggccacgccgcggcccagttgctagccaggcagggtggggatttgatcttgccaaggaaatgtgagcgggaggccgagcgttggaggtgggtaagtcgtcactatgcagggcggagccatcctgtgtctatcacgcccaagggcggtgcatgcaaattgactcccgcatttggcttttccccgggctccgtctccgcgcgctgcaacccgcgacttccaagaactccccgcgtagtcagctgcccgggccacgccccctttccggacccgccctgcccgccccagggaggcgggggcggagcttgcggcccagcgggaaggcggaggcgggggtcgcgcccaggtcccgggggcgtcagaggcaatgggaagtcgtggcttctgcaccgcccttgggggttcggctcccaatcagggaaaaagggccgagagaatgaaagagtaatgagacttgcgagtttgaggctcacactactctctttgggttgggggttgctgaagcctccacgtgtattcagggagccccgaacctcacacctctgtccaggggagctcagaacccgccgtgttctggaaagcctacaccttccccggttttttagtgtctaggggagcccacaaccctcacagccgtgtctagtagcgctcagatccacacacctgtgtttgggggagcccagatcttctctacctgtgtccagatgagttcagagccccgacgtttgtccaggaaagcccacctctgtccagaagcgctctgaccaggacctttcctgtttcctgaggctcagcctagggggtcatcccacccaggtctgtgttaaggggagcttgtgtctccccaaacatgtccaagtgagctgagctcaggagctgaggcctccccatatcgtgctccccgcctggccctttggtgaatccctttctcagaagaaaccctcaggggccctagccctgctgcccttccctgcactgtcttcgagcctcctggcccaattggcccctcccccagtacactgttgagtcttagttaagacataatcccagcattcactgtcccccatcccccagctctcccgcacctcggcggctggccgggcccccgggagtgccgtcatcccagccggctggccacccgactggcaccaattaatttcctcctcggcctgtccacccagggcctcggcctgtctggttgccagctgctcaccctcagccagcccgccccctcgggctcccagggaattgccaacagttctcctccttcctgcaacccccccacccccaatccaggccaccccacccagcacagttaatcagaaaaagctgacagttaggacctggaggagtgatctgaaatcagatggaggaggggtgggatgttaaactttcggacccagggatgcttggggtggagcgggggcatggctggagggaggcagaggatccagttttacttaagaaccccaaatcaaaggcttgtagcttccagatggggactgcagggagggctgaccccctcccgcatacaccaggcgggcaaggtggagcgcccctcctcggaaattgccccccgcccaagatgcgtcagtgacagctgtgcctcctcagcccgcacccagccggtttccttttcctgtgcacactctcccgatgggctggccttcagcctggagagactccacggccccttggaaggggctccccagagggtcttcctggacgagggggaggggacaggctgaagaacaatggggcttctgtggctgcaggacgccaggcacttcctgttaaccctttcctcggggtgcagctgcagggagcacctcccaggtcccgccttgtgggaaggggcagaggcagcctgaggggaaatcttgttgcgggaattaactgttgtgttaattgaggcttttgtgagtgtacttaggaggggtgaggtgaatcacaccttttctcacttgatggagttacagggctttctcctctattgctgagggctgtgcagtcagggacggggcagggctagcctgggagaagcctgtgcactgagctcagagacgttcaaggcttttccccagataggttacaccaggatctccagggcatggacagggatggggtcggggaacccaggcatcctaggtgaatccaaggaacagccatgtctgcaaaccactgttctagctgccttgctgggcttacctaggggccacgatccctgagtcagttcccttggcagcctgggtctcagtttcccttggcttgtagaagttctttcaggggcctaccaagaggacacggcagtctaggagctccctaaggggcaggagtgggctgggagccttggaaacggtttgtttctcctgggagccctgagaagtcatgttgggggaattaactgctgtgttaattgaggcttcaagccaagtcccctctgtttacacagagagtctgagaaatgccctcggaagattccgagagcctccaaaggccccagagactttgcttctgccctggaggcttctggttttttacgggtaagataacctctcccatagtcaagagagagacttactgatgcttatggcagccccaggccctgaaggtatgctgtacttggtcacttccgtgcatttgtttaatcctcaccacaagcctgggtcaggataaaaagtaggcacttcactctttttttttttaggggtcttgctatgttgcccaggatggtctttaactcctgggctcaagtgatcctcctgccttcggccttccaaagtgctgaggttacaggaatgagccaccgtgcccagcccagccctaaagtaggcctttttttccccccgcgacggagtttcactcttgttgcccaggctggagtgcaatggcacggtctcagctcaccgcaacctccgtctctgggttcaagtgattctcttgcctcagcctcctgagcagctgggattacaggcatgggcaccatgcccggctaattttatatttttagtagagaggtggggtttcgccatgtgggtctcgaactcccaacctcaggtgatccgcccgccttggcctcccaaagttctgggattacaggtgtgagccaccgcgctcggccttttttttttttttccttctgaagtggagtcttgttctgttgcccaggctggagtgcagtgacgcgatatcagctcattgaaccctctgcctcccaggttcaagcaattctcctgcctcagcttcccaagtagatgggattacaggcatgcaccgccacgcccagctaatttttgtatttttagcagagatggggattcaccatgttggccaggctggtcttggaactcctgacctcaggtgatctgcctgcctcagcctcccaaagtgctgagattacaggtgtgagccactgtgccccaccaggtaggcactttcattagccccattttacagatgagggaactgaggggaactgaggcacagagtggttaaacaaagtgtccagggttaccctgtccagtaaagcaaagcccattgacattcttcctctcctggatttttttttttttttgagatggagtcttgctctgtcgcccaggtgggagtgcaatggcccaatcttggctcactgaaagctctgcctcccaggttcaagcaattctcctgcctcagcttcctgagtagctgggattacaggcgtgcaccaccgtgcccagctaatttttgtattttttttttttttaagtagagacggggtttcaccatgttggtcaggctggtctcgaactcctgacctcgtgatctgcccgcctcggcctcccaaagtgctgggattacaggtgtgagccaccacgcccggccggatttttcttcttttcttttcttttcggtggggaggaggagagtgtgaggacctttgtcctggttggtgaacttttgcttaaacccagcttctatctctggttctcagataaggaaccagctccttctgggagctgagagccgcaccccaggtctccttgccactcctgggctacctgttttctctttcctcatatccagggctgatcactcaccaggttccctcttagaatcatttgccacttcacttcattttcctctcttctcccctttctgcaggatgaacacttccccaggggtcaatctgtgcacgctcagtccaggggctgggtaaagacaaagttttttgtttgctgttgttcacttgtttatttaaatttatttattttgagatggagtctcgttctgtcacccaggctggagtgcaaggcgcgatctcggctcactgcaacctccgcctcccgggttcaagcaattctctgcctcagcctcctgaggagctgggattacaggtgtgcaccaccatgcccggctaatttttgtatttttagtagagatgtggtttcaccatcttggccaggctgatcttgaacttctgacttcgtgatccacctgtctcagcctcccaaagtgctgggattacaggcgtgagccactgcgccccaccctcacttgtttatttacttgttttgtaaacattatttactgagcatgatcaaactgctagactggagaggctgctgcaatctcctccctctgcccccgccatttcctggtacccatccttgctggtggtgtctgcaatcagcggggccctggctgagttcacgggaaaggaaatggctcattgcttcagcctttagaccggggggcagggagggcctgtcgggaggccgcctagtcaggggcgtgtcagaggccagaggggccggggcccagcagctggggcttggtaagctctggagcctgggctccaggccagctcgctgccaacctccacctgagaccaccccacccccaacccccttccttctctcccctgctgccgaggcgcgcccttccggagtgaaactttggtttctcacgacccggaaggcttgaagcaaacctgcaattactcactgcctggtctgtgcgggctgcagctctcagactcaggatgaggtggcggtaggtggggtggggctcttgggacccttttaccccttcgtgctgctggctgggggaggccactaaagtctgcgcgctgccttccacgcgttctccagacactttccaaatccctgcggacactaccttataaacagatactggaattttcaaagtactgtcatgctgtttgggaccagaaattccctcccatgagggttggatatgaagccagtttggagggggaagctgagggtgcatgcccctggatctaccaaagccttctcttcagtctgggaggttttttttctttttctttttcttttttgagacagagtctcactctgtcgcccaggctggagtgcagtggtgtgatctcagctcactacaacctccacctcccaggttcgaatgattctcctgcctcagcctcccgagtagctggacgacaggcgtgcgccaccacacctggctactttttgtatttttagtagagacagggtttcaccatgggtttcagagggtgcagtggctcacgcctgtaatctcaacactttgggaggtcgaggcaggtggatcacttgaggtcaggagttcgagaccagcctggacaacatggtgaaaccctgactctactagaaatacaaaaattagctggtggtggtggcatgcacctgtagccccagctactcaggaggctgactcaggataatcaggaacccgggaggaggaggtttcattgctccagactttgagactccatctgaaaaaaaaaaaaaaattaagccaggcaaagtggctgatgcctgtaattccaaagctttgagtggctgaggtgggatgatcacttgaggctaggagttcgagaccaacctatgcaacatggcaagaccaccacacccccatctctgcaaaaaattagccaggtgtggtggcgcacacctgtagtcccagctactctagaggctgaggcgggagggtggcttgagcccaggagtttgaggctgcagtgagctatgatcatgtcactgcactccagcctgggtaacaaagcaaggcccagtctcaagaaaatcagttatttttgcatatgtatggcgtacataagaacatttgttacatgtctataatgtaacctctctctgctttgctttgcagctctggcaggggcagggcagcagtgctatgatgaggccacttgtaattgggggtgttcatgggagggcctttgttctctgagcactgagtgggcactgctgtatctccatatgcctgggatcctcattggttcccctcctttctcccaggcttgtgcctctttcttttacttgactttttttttttttccacccaggctgccgtatagtggtgccatctcagttcactgcaacctccacctcccaggttcaagcaattctcctgcctcagcctccccagtacctgggactacaggcatgtgccaccatgcctggccgatttttgtatttttagtagagacagggtttcaccatgttggccaggctgatctcaaactcctggcctcaagttatccattagcctcagcctctgaaaatgctgggattacaggcgtgagcccggcctttcttctttttcttttttcttttgtttgtttttttagagacagggtctcactctgtcacccaggttgcaatgtagtggcatgatcatagctcactgcagccctgaactcctgtgctcaagtgatcttcccacctcagcctcccaagtagctgggactataggtgtacatcaccatgcctggctaattttttaattttttttgcagatatggggtcttgctatgttgctgaggctggtctccaattcctgatttcaagtgagcctcctgcctctgcctcccaaagtactgtgatgagctactacgcctggtcattgtccctctttctcatgactctctggacatccctggggtggagggtggggcaggcacacacatccctcaacttcccagtggttccacgatgactaagccagccctgtccctgaggctgggagtctggagctaggatccacccccatggcctcatatcccaaccttgagcctgggtttctggtcagactggacgggctagctcggtctccttaactctcagagttgccttgtccaggcccagcgggtcccacacagccaggcacaccccaccccacagggctcctgggaaattctctgccccaccctcaggctgcctcagacagactgaggttacctgtgattgtcccagataacccgagtgagcccatcctctgctctgggtggctccctccctggcagctgacctgtaaattttgaaaagatggggacaatgctcagctaggagggatgctcctgctgtcttccctgctggcctggccactccccagactggacaggtcccttggcagctcttcccagcaacccaggcagccccaagccccctcttgcttggtgttccaggccagtgagaatctcacttcttctccaaaactttgtcttccaactcctgttttgttgtgttttgtttttttattgaaacagggtctcattctgttacccaggctggagctcatggcatgatcatagctcactgcagcctcaaactcctaggctcaagcaattcttcccacctcaccctcctgagtagcagggactacagatgtgggccaccatggtcagctaatttaaaaagtttttttcttaggccaggcatggtggctcacgcctgtaatcccagcactttgggaggccgaggcaggtggataacaaggtcaggagttcgagaccagcctggccaacctggtgaaacccctgtctctactaaaaatacaaaaattagccgggcgtggtgacaggcacctgtagtcccagctgcttgggaggctgaggcagagaattgcttgaacccgggagatggaggttgcagtgagctgagaacactccactgcactttagcctgggcgacagagtgagactctgtctcaagaaaaaaaaaattatatatatataaattagccaggcatgatggtgagtgcctgtaattccagctccttgggaggctgaggtgggagaatcacttgaacctgggaggcagagattgcagtgagccaagattgctccactgcacaccagcctaggtaatagagtgaaactccatctcaaaaaagaatttttttttttcagagatggggatctctctgtgttgcccaggctggcctcaagcaatcctcctgcctcagcctcccaaagtgttgggatgacaggcatgagccactgcgcccggcctgtggtttctccatgtggggccagatcactctttgtgcagggagctaccctgtgcatctttgatgttgagtagtagccctggcctcaaccctgtgccaatgaaagatgtctccagatgttgccaaatgttggggtggggtggggcgcagccttgccgcctgcttcacctgttctacctgtccatactcataccaacctgcaaagtaacttagaccgtgtgttttctttttctttttttttttctgagatgaggtcttgctttctcccaggctaaagtgcagtggcacgatctcagctcactacaacctctgcctcccaggttcaagcgattctcctgcctcagcctctcgagtagctgggattacaggcacccgccaccatgcgcagctaatttttttattttgagtagagatgggatttcaccatgttggccaggctggcggctcgaactcctgacctgacctcaggtgatccacccgtctcggcctcccaaagtgctggattacaggtgtgagccaccgtgcccagctggagcatatgtgttctttttttttctttctttctttctttctttttctttttttttttgagacggagtcttgctctgtcacccaggctggagtacagtggcgccatctcggctcactgcaagctccgcctcctgggttcatgccattctcctgcctcagcctcccaagtagctgggactacatacaggtgcccgccaccacacccggctaatttttttgtatttttagtagagacagggtttcaccatgttagccaggatggtctcgatctcttgacctctagatctgcccgcctcggcctccaaaagtgctgggattacaggcatgagccactgcgcctggccaggagcatgtgttttctcatcttgggcctggatcgagtccttatggtggaggtgatctgcgggttccagaatcttgggaagggattggtgagaccatagcatggcccattgcaccgtccctctacctggagtgaggggtgccagcctcccatttcctggtgggtgggcttgctggatggcagcctgaggtgggtggagtcaggctgccttgttctatttcctggttcccagggttgggtggtggcaatggtggccccggagccagagggcttggggtaccctgatcctgcctccggatttactgggtgggtgctagggtgtgtgctccaagaccgatggcccctgtgggcgtggaggagaaaccagagactcaagcagatctccctgcctgccttctgccctcatgtcccacttcaccttggctctaggccaggggctgccagaatggtgactcagagcgactgagaagaggagagaaacagaatggaggtccttatcatcctccaatctccgccatcccagcatccccataaaggtcaggacccttgaggccacatgtcaagaccatccacactgccctctcctgcttcctcctcctctacccgccctctttcagtgggatttttttttccgggtaccacgctagggcaggaaggcagaagtgagcatggggcgtggaacgtctctgaggttggaatatatttaggccaggagaagagtgtgtgtgtggtgctggccaggccctggcgccggctcggcgggcttgaggagtgatggtggggggccctgagccagtgtggggatgctcctgccttctccctttttttttttttttttttttggttttgagatgtagtctcgctctgttgcccaggctggagtgcagtggtgcggtcttggctcactgcaacctctgcctctttggttcaagtgattctcttgcctcagcctctggagtagctgagattacaggcatctgccaccacgcccggctaattttttctatttttagtagagatgaggtttcaccatgttggccaggctggtctccaactcctgacctcatgatccgcctgcctcggcctcccaaagtgctgcgattataggtgtgagccaccgtgcctggccaccttctcccttttaaagacagcctgtcagctttggggaggaggagtgggaatcactaggcccccaccaaggctgaggcaggccctgtgtgggccagatacatttagcatcttcaaaacaaaccagcaagactaacatcaggatcacttacagctgtaaacacaaggcccagagaggttaagtggctttcccaaggctgttcaggaaagaggtgatgatggaagggttctcttgctggcccggctggctgccaccattcatgcacgcagtgttcattcatgcaacacctttgtgggtacagcctagcctgtgccagcccccaacaacgtgcgggagaacaagaagccaactggacccaggtcggcaaaccgcagcccataggtggcattcgtctgttgtctctgcacggcccttgggctaagaatggtttttacatttttaagtggttgaaaacaaaagaataagagtattccatgatacataacaattatatgaaattgcaattccagccttcatgaattcagggtacacaggttacacccatttgagtccacattgtctgtggttgccttttcgtgactgtggcagagtggagctgttttgacagagaccctgcaaagctaaacaactttcctatttgtcccctcctcccctgtccccctcacacttttttttgacagagttttgctcttgttgcccaggccggagtgcaacagcgcaatcttgggtcactgcaacctccacctcgttggttcaagcgattctcctgcctcagcctcctgagtagctgagattacaggcgcctgcaactatgcccggctaatttttatattttaagtagagacaggatttcaccatgttggccaggctggaccggaactctgacctgaggtaattcagccgcctcggcctcccaaagtgctaggattacaggcgtgagccaccacacctggctttttttttctctctctctcttttttgagatggtgtctcactctgtcgcccaggctggagtgcagtggcgtgatttcggctcactgcaacctctgcctcccgggttcaagcgattctcctgcctcagcctcctgcaacctctgcctcccgggttcaagcgattctcctgcctcagcctcctgagtagctggaattacaggcgcgtgccaccatgtctggctaattttttgtatttttagtagagacgaggtttcgccatgttggtcaggctggtctggaactcctgacctcaagtgatcagcccgttttggcttcccaaagtgctggaattacaggccagagccaccacgcctggccatgcccggctaatttttttgtttgtttgtttgaggtagagtttcactcttgttgcccaggctggagtgcagtggcatgatctcggctcactgcaacctccacctcccaggttcaagtgattctcctgcctcagtctccctagtagctgggattacaggcgtccgccaccacgcccggctaatttttttgtatttttagtagagacgggggttcactatattggccaggctggtcggcaactcctgaccacaggtgatccacccgcctcagcctcccaaagtgctgggattacaggcgtgagccaccttgcccagccggagcatgtgttttctttcctttttttttttttttaagagacggagtcttgctctgtcacccaggctggagtgcggtggtgggatctcggctcactgcaacctctgcctcctgggttcaagcaattctcctccctcagccttgtgagtagctgggattacagacgtgcaccactatgcccggctaattttttttgttttttgtattttagtagatacggggtttcaccgtattgcccagggtagtcttgaactcctgaactcaggcaatcctcccgcctcagcctcccaaagtgctaggattacaggtgtgagccatcacgcctggcataaaataataataataataataataataataataataataataataaaattggctgggcttgatggctcattcctgtaatcccagcactttgggaggttgaggcaggcggatcatgaggtcaggagtttgagaccagcctggctaacatggtgaaacctcatctctactaaaaatacaaaaattagccaggcatggtggtgggcacctgttaattccagctactggggaggctgaggcaggagaatcgcttgaacccgagggctggaggttgcagtgatctgagatcgcaccactgcactccagcctcagcgacagagcaagactctgtgtcaacattgttttttttaggccaggggcagtacctatttccagcactttgggaggcccaggcatgaggatcgcttgagcccaggaatttgagaccagccagggcaacatggagaaaccctgtctctagaaaatatacaaaaaattagctgggtgtggtggcatgtgcctgtggtcccagctacttgggaggctgaggtgggaggatatgccaagtccaggaggtcaaggctgcagtgagctgtgatcacaccactgcactccagcctgggtgacagaagaagaccttgcctcaaaaaaaaaaaaaaagttttttattattatttttttttctttttgagacagagtctcgctctgtcgcccaggctggagggcagtggcacaatctcagctcagtgcaagctccgcctcccaggttcacaccattctcctgcctcagcctcctgagtagctgggactacaggcgcccgccaccacgcctagctaatttttttgtatttttggtacagacagggtttcaccgtgttagccagaatggtctcaatctcttttcaccttgtgatccgtccgccttggcctcccaaactgctgagattacaggcatgagccaccatgcccagccttaatttttaaagataggggtctcactatgttgcccgtttatctgagctcaagcggtcctccagtgttagcctcccaagtagctggactcaggtttttattttaacaatgtaagactatattatccttataagaatactttaaaaaaaatggataatcctcccagactccctgatatgggagttgaaggggcagatgtggggcggagggagaggggagctggtgttggaaccaggctggtttgctaaatccagcctgccacctgtttctgcacagcctgcgagttaagaatggctttttcatttttaaatggttgggaaaaaagaatcaaaagggaaatttcacgacatggggaaaagtatatgcaattcaaattttagtgtccataaataaagttttattggcatggagccgggctcattcatttaccctgtatccgtggctgcttttacgcttcaccgcagaattgagtcattcaacagactgtctggccctcgaagctgaaaatatttactgtctggcccattggagaagaagcttgtagacccctcttctaaggggcctgagaccctcacttcaatctgtccctgattcaggccgtcccaggatcatttcttcattggcatggaaaagacgttggtgtgatttggaggcaggaggactcgctgaggactgatccttaacactggatgccccctggggaggaggggcattggggtcttcaaggtgaagcaggattgaggactgaggtgggcaggctggctatgggcacggcaggagcaaaggccaggaggccagacctgtgcctcaactcaagctgccccgctcagttcgagtccaacttcggcaacatagcaaaaccccgcctgtacaaaaaaattagccataggccgggcgcggtggctcatgcctgtaatcccagcactttgggaggccgaggcaggtggatcgcgaggtcaggagatcgagaccatcctggctaacacagtgaaaccccgtctctactaaaaatacaaaaaaaattagctgggcatggtggcgggcgcctgtagtcccagctactcgggaggctgaggcaggagaatggcgtgaacctgggaggcagagctggcagtgagccgagattgcgccatgacactccagcctgggcaacagagcgagactcagtttcaagaaaaaaaaaaaaaaattagctgtgcatggtggcacgtgcctgtagtcccagctactcgggaagctgaggtgggaggaattgtttgagaccaggagttccaggctgcagtgagccatgattgcaccactgccctccagcctgggcaacagagtgagaccttgtctcttaaaaaaattaaaaaaaaaaagctgggcgcggtggctcacacctgtaatcccagcactttgggaggctgaggcaggcagatcacctgaggtcaggagttcaagaccagcctggctaacttggcaaaaccctgtctctactaaaaatacaaaaatttgctgggcatggtggtgcatgtctataatcctagttacttgggaggctgaggcacgaaaatcacttgaactcaggaggtggaggttgcagtgagccaagatcatgccattgcactccagcctgggtgacagagggagactctgtctcaaaaaataaataaataaataaataaataaataaataaataattataaataaataaaaggaaagaaagagagacagagagagaaaataaaaaagaaagaggcggggcgcggtggctcacacctgtaatcctagcactttgggaggttgaggcgggtggatcacttgaggccaggagttcaagaccagtctggccaacatggtgaaaccacatctttactaaaaataccaaaaaaattagccgtgtgtggtggcacgcacctgtagtctcagctacttgggagactgaggcaggagactcacttgaacccaggaggtggaggttgcagtgagccgagatcgcgccactgcactccagcttgggggacagaacgagactgtctcaaaaaagaaaaaagagagagaaagaaagaaaaaaaataagcaagcaagctcccccccatcccatctcctagtggatgggacagatctattccatgggtcacctccccctaaccggtcccccaggcccatctgctgtctctgcatttctctgctcctgtccaccatcactgtttgcaccaggctccatctctttcattgtcttgggtctggagatgtaccctgagctcccttagttggtcccccacctctcttatctccttttctcagcatgaccagtgcacttttctttcttttctttttgttttttttttgtttattttttgagacggagtctcgctgtgttgcccaggctggagtgcagtggcgtgatctccactcactgcaagctctgcgtcctgggttcaagtgattctcctgcctcagccttccgagtagctgggatacaggctcctgccaccacgcccggctaatttttgtagttttagtagagacaaggtttcgctatattggccaggctggtctcgaactcctgaccttgtgatccgcccactttggcctcccaaagtgctgggatttcaggggtgagccaccgtgcctggccttttttttttttttttttttttttgagaccgagtctcactctgtcaccaggctggagttcagtggcacaatcttggctcactgcaaactctgactcccggattcaagcgattctcctgcctcagcctcccaagtagctgggactacaaggcgcccaccatcacgcccggctattttttgggttttgccatgttggccaggctggtctcgaactcctgactgcaggtgatccacctgcctcggcctcccaaagtgctgggattacaggcgtgagccactgtgcttggccttttttttttttactttaaaaaaaaccttttttcctcattccatgcttcatttcaaaattaaccattttaaagagaacatttcggtgacatttcgaacatccacattgttgtgcagccgtcgccaccatccatctccagaacgctttcatcttggaaaactgaaacactgtcctcattaaatactcactccccattccccctcccagcagcccctggcacccacccatctactttctgtctctgtggatttgactattctgaacatttcatatcaatggaataatctactgtgtggccttttgtgtctggcttctttcactcagcatgatttttaaaaatttttatttttagaaacagtctcactctgttgcctgggctggggtgcagtggtgtgaaaatagctcactgcagcctcaacctcctgggctcaagcaatcctcctgcctcagcctcctgagtagctgggactataggtgtgtaccacaatgcctggctaataaaacctttttttttttttttttggttggatgcggtggctcacgcctgtaatcccagcactttgggaggccgaggtgggcggatcacgaggtcaggatatcgagaccatgctggctaacacggtgaaaccccgtctctactaaaaatacaaaaaaattagccaggcgtggtggcgggcacctgtagtcccagctacttgggaggctgagccaggaaaatggcatgaaccgggaggcagagcttgcagtgagccgagattgtgccactgcactccagcctgggcaacagagcaagactgtgtctcaaaaaaaaccacagggtcttgctttgttgcccaggctggtgttgaactggcttcaagccatgctcctacctggacttctcaaagtgctgggattacaggcatgagccactgcgcccagcctgccatcatgggttttttttgttgttgttttttttggtgggggggtgggtggtggttaatgcatgttgcagcatggatcagtgctttattattattattatatatttttatgagacagagttttgctctatttcccaggctggagtgcagtgatgctatctcagctcactgcaacctctgcctcccgggttcaagcgatgtttgagcctcagcctcccgagtagctgggtgtggaggcacctatcaccatgcctggctaatttttgtatttttagtagagatggggtttccccatgttggccaggctggtctcgaactcccgacctcaggtgatctacccgcctcggcatccgaaagtgctgggattacaggcgtgagccaccttgcctggcccagaatactttcatcatcccaaactgaaactcaacctctgttaaacatcaaatcaatattctctgcacacccccagccccttctactgttctacttcctgtctctaagccagtgagctttcctttttttttttgggacacagtctcgctctgtcatccaggctggagtgcagtggtgtgatctcggctcaatccagcctctgcttctcgggttcaagagattctcctgcctcagcctcctgagcagctgggattacaggcccctaccaccatgcctggctcatttttgtatttttagtagagatggggtttcaccatgctggccaggctggtctcaaactcctgacctcaggtgatctgcccgcctcggcctcccaaagtgctgggattacagatgtgagccaccacgcctggcctctttttggtttgttgatgtaggctgggctgattgatcctcccccatctgatggtgagcccttgagggctggaacaggatccttcttcctcagcactgtgcactcccagctcccaggcctgtgcttgatcctcagctgatgctcaaaatacagttgaaggaacggcagaaaattccaaatgggtgggcaaaggatgcagtccgctgctggggaggatagatgggctgaggcaggagatgaatgcctcgtggctctgggtgggtgtagggagctcttgggctgcaggtggggttgggtgcatgagccgagatctcagggggctggctgagtaggggctgcagacactgagagagaagaagaagggtctttggaggcagagaagtgggcacagagagatgggctccccaggcagaagtgtagccatgtggccaggagaaggtgggacggagggacgggaggtgtggaggctccatggtcacattcttggccgtcctgcatgtgcgttcaaagcctgggaagggcccggtgcggtggctcatgcctgtaatcccagcactttcagaggccgaggcgggcagatcacctgaggtcaggggttcaagacaagcctggccaacacggtgaaaccctgtatctactaaaagtacaaaaattagctgggcgtggtggcaggtgcctgtaatcccagctactcaggaggctgaggcaggagaatcgcttgaacccagaaggcggaggttgcagtgagctgagatggcaccactgtctgtctgggagacagaacgagacttaaaaaataataataataaaaataaaaagtaacaaagcctgggaaggcctggggaagggggctctcaatcccagcactttgggaggccaaggcaggagggtcgcttgatcccaggaggtcaaggctgcagctgcagtgagctatgatcgtgccactgctttccagcctgggtgacagagcaagaccctgtctgcaaaaaaaaaaaaaaaaaaaaaaaaaagtccagaaaggccggtcttgggctgagtcctgccagggcctggtagccagggcctaacagtgtccttgtgtccttgctaggaggtgaattcctagtgtaggcttgacccactttagctagggaagccacaggatttaccatttccaggggccagctctgcctgaggagagaggccttcctcataaagtcaggcttggcttcctcccagctggctggcctccttctccctgattctaaatgcgggcttgtcaccgtgtgtctgcatgtaggcgcacgagcgcacatctgtgtgtgggggggtgtttgtggtgctgtgggcagcgtgggggtggcatgtgttagcaagctgggggccatttctaccccacggttctttttatatctcacatttacagaaagcctggacctctgagcctgggcctgtcagtgggctgtttgaggctttgaaggaagggaccaagaggcggaggcgtctgaaaccccggcgccgagggaggatagtcgggtcaggggtggctgttagcttccttccattggcactgacggcatgcagcccggggccatagccctgcagtgtcaggtgttgcagagctatattttaagacactggcaccatggttcacacctatattctcaacactgaggttggaggaagctgaggttggaaggctgaggtgggagggtcactggagctcagggattcaagaccagcctaggcaacatagtgagaccccatctttacatatatatatatatatatagcgattatgtgtatatatatatgtatagcgattatatatatatagcgattatatatatacatattttttctcctgcttcagtctcctgagtagctgggattacaggcttgtgccaccacgcccagctaattttgtatttttagtagagatgaggtttcaccatgttggtcaggctagtcttgaactcctgacctcaggtgatctgcccccctcggcctcacaaggtgctgggattacaagcgggaggcactgtgcccagccctacaaatatatatatattttacttagctgggtgcagtggctgatacctgtagtcccagctacttgggaggctggggagggaggattgcttgagcccagaagatcgaagttgcagtgagctatgctcgtgccactgcactagcctgggtgacagagagatcctgactaaaaaataaataaataggccgggcgcggtggctcacgcctgtaatctcagcactttgggaggccgaggcagatggatcacgaggtcaggagatcgagaccatcctggctaacacggtgaaaccccatctctactaaaaatacaaaaaattagccaggtgtggtggcgggcgcctgtagtcccagctactcgggaggctgaggcaggagaatggcatgaacctgggaggcggagcttgcagtgagccgagatcgcaccactgcactccaggctgggcgatggagcgagactccatctcaaaaaataaattaaataaataaataaataaagccgggcatggtggctcacacttgtaatctcagcactttgggaggctgaggtgggcagatcacttgaggtcaggagttcgagaccagcctggccaacatggtgaaacccccgtctctactaaaaatacaaaaattagccgggcatgatgttgggaggtccctgtaatcccagctactcaggaggctaaggcaggagaatcgctggaacctgggaggcagaggttgcagtgagccaagatcccgccactacactctagcctgggcaacagagctagactccatcttaaaacaaatcaaagtaaatataataaataaagcatactctctccacctccactgctgggtcctcaccaggatgaatggttcagagcaaggcctgaaggggtcctccctgagatgctgggagcgtctccctgagaagccctgttgggctggtcccagtggaccctgggtgctcgctgcctaagctgccctcccccatccctgcccagctctgcaccccatgagaagccctgtgggtggcccccaactcaggagttcccacagggagctgagggccggtgatagccccccaggcttatgcagtgacctcgcttaacagctggtaactcctgcaggattctgaggcacccgcctcctcccagagggacacattcatggccttttcctatttatttatttattagagatggggtcttgctctgtctcccaggctggagtccagtggcatgactattgctcaatgcagcctcaaactcctgggctcaagcaatcctcccacttcagcctctagagcagctgggactatgggcatgcaccatgctgggctaatttatttttatgtgtattattgtattaattttttttttttcgacggaggtttgctcttgttgcccaggctggagtgcaatggcacaacctcggcttaccgcaacctccctcttccgggttcaagcaattctcctgcctcagcctccggagtagctgggattacaggcaccccccaccatgcccggctaattgttttttttatttttctagagacagggtttcaccacgttgttggccagactggtcttgaactcccgacctcaggtgatctgcccgcctcaacctctcaaagtgctaggattacaggcgtgagccactgctcccggcctcgtattaattttatttttaaaaataaacacactgcaggcctggcgtggtggctcacgcctgtaatcccagcactttgggaggccgaggtgggcggattatgaggtcaggatatagagaccaccctggctaacatggtgaagccccgtctctactaaaaatacaaaaaattagccgggcgtggtggcgggagcctgtagtcccagctactcaggaggctgaggcaagagaatggcgtgaacccgggaggcggagcctgcagtgtgccaagatcacgccactgcactctagcctgggcaacagagcgagactctatatcaaaaaaataaataaataaaagtaaataaaaataaaataaacacactgtagccttgaaatcctgggctcaagcaattctgactctgcctctcaaaacaatgggactgcagaggtgagccactgtgtccagctaaaaaaatatatatatatgtatatatgtgtatatatatgtatatacatgtgtatatatacatgtgtatgtgtatatatacgtgtatgtgtatatatacgtgcgtgtatatatacacgtgtgtgtatacgcatacatacgtgtgtgtatacgcatacatacgtgtgtgtatacgcatacatacgtgtgtgtatacgcatacatacgtgtgtatacgcatacatacgtgtgtatatgcatacatacgtgtgtatacgtatacgtatatatatatcagccaggttcggtggctcatgcctgtaatcccagcactgcgggaggctgacgtggctggatcacctgaggtcaggagtttgagaccagcctggccaacatagcaaaaccccggtctctactaaaaataaaaaaattagccaggcatggtggcggacgcttgtaatcccagctacttgggaggctgaggcaggagaatcacttgaacccgggagacggaggttgcagtgagccgagatcacgccattgcccgccagcctgggcaacaagagcaaaactccatctcagaaaaaaaaaaaatttttttttctttgagacagtcttgctctgttgcccaggctggagtgcagtgacacaatcttggctctctacaacctctgcttcctgggttcaagtgattctcatgccacagcctccatagtagttgggatcacaggcacgtgccaccatgcctggctgatttttgtatttttagtagagatggggtttcaccatgttggccaggctggtctcgaactcctgaccgccaatgattcgcctgctttgtcctcccaaagtgctggtgtgtccggagttggtgggttcttggtctcactgacttctagtatgaagccgcggacccccgcagtgagtgttacagcccttaagggggcaaatctgaagtttgttccttctgacgtttggatgtgttcggagtttcttccttctggtgggttcgtgatctcgctggctcaggagtgaagctgcagacctttgcagtgagtgtcacagctcttgaggcggcgcatctggagttgtttgttcctcccggtgggctggtggtctccctggcttcaggagtgaagctgcagacctttgcggtgagtgttacagctcataaaagcagtgtggactcaaagagtggtcagtagcaatatttattgcaaagagcaaaataacaaagcttccacagtgtggaaacggactggaacgcgttgccactgccagctgggacagcctgcctttattctctcatctggtcccacccacatcctgccgattggtagcgcccagtggtctgttttgacagggcgctgattggtgcgtttacaatccctgagccagacacaaaggttctccacgtccccaccagattagctagatacagagtgtccattggggcattaacaaagcccgagctagacacagggtgctgattggtgtgtttacaaatcttgagctagatacagagtgctgattggtgtattcacaatccctgagctagacataaaggttctccaaggccccatcagagtagctacatacagagtgtcgattggtggattcacaaaccctgagctagacacagggtgctgattggtgtgtttacaaaccttgagctagatacagagtgccgattggtgtatttacaatccctgagctagacataaaggttctccaaggccccaccagactcaggagcctagctgccttcacccagtgtatcctgcaccggggctgcaggtggagctgcctgccagtcccgcgccgtgtgcctgcactcctcagcccttgggtggtcggatgggactgggcgccgtggagcagggggtggcgctcgtcgaggaggctcgggcggtacaggagcccacggagggggtgggaggctcaggcatggcgggctgcaggtcccgagccctgccccacggaaaggcagctaaggcccggcgagaaattgagcgcagcgccggtgggctggcgctgctgggggacccagtataccctctgcagctgctggcccgggtgctaagcccctcattgcccggggccggtggggcgggccagccggctgctccaagtgcagggcccgccaagcccacgcccacccggaactccagccggcccgcaagcgccgcacgcagccccggttcccgctcgcgcctctccctgcaagctgagggagtgggctccggccttggccagcctagaaaggggctcccacagtgcagcggtgggctgaagggctccccaagtgccgccaaagtggaagcccaggcagaggaggcgctgagagcgagggagggctgtgaggactgccagcacgctgtcacctctcactgggattacaggtgtgagctaccacgcccagccaaaaaaattttttatagatggggtctcactatgttgccgaggctggtctctaactcctgagggaaagcaattctctcgcctcagccttctgagtacgtgtgattacaggtggagtgatgaaaatattctgaaactagatgcaggtggtggttgtattacattgtgaatgtactgaatgcctcagaattgtacattttaaacaattttatgctatgtgaatttcacctcccttcctttcctccctctctccctccctcccttcctccttccttccctccctcccttccttgcttacctccctcccttccttccttcctgtctttctttctctctctctctctctctttctctttctttctctctctctctctctctttctctctttcttctttctttcttgtctcgctctgtcgcccaggctggagagcaatggcgcgagcttggctcactgcaacctctgtctcctgggttcaagcaattcttctgcctcagcctcccaagtagctgggattacaggggcctgccactacacccggctaattttttgtatttgtatttatttttttatttttgagatggagtcttgctctgtcacccaggctggagtgcagtggcacgatctcagctcactgcaacctctgcctcccaggttaaagcaattctcctgtcttagccttctgagtagctggtactacaggcacctgccaccacgcctggctaatttttgaatttttagtagagacgggtttcaccttgttggtcaagctggtctcaaactcttgacctctggtgatccacccgcctgggcctcccaaagtgctgggattacaggcatgagccaccacacccggccaggctttttaaaattttttttgagacagagtcttgctcttctccctcaggctggagtgcaatggcatgatcttggctcactgcaacttccacctcccgggttcaagtgattctcctgcctcagcctcccaagtagctgggattacaggcacctgccaccaagcctggctaatttggtatttttagtagagacggagtttcaccatgttggccaggctggtctcgaacttctgacctcaggtgatctgcctgccttgggctcccaaagtgcctggattataggcatgagccactgggcccagcctctttttactttcttttttttttttgagacagagtttcactcttgttgcccaggctggattgcaatggctcgatctcgactcactgcaacctccgcctcttgggttcaagcaattctcctgcctcagcctcccaagtagctgggattacaggcatgtgccaccatgccaggctaattttttcttttctttctttttttttttttttttttgagacggggtcttgctctgtagcccaggctggagtggagtggagcgatcttggcttactgcaagctctgcttcccgggttcatgtcattctcctgcctcagcctcctgagtagctgggattacaggcgccctccacaactaatttttttgtattttcagtagagacagggtttcgccgtgttagccaggatggtctcgatctcctgaccttgtgatccacccgccttggcctcccaaagtgctgggattacaggcgtaagccaccgcgcccagcctctatttttaatagagacggggtgtcaccatgttctccaggctggtcttgaactcctgacctcagatgatctgcccacctcggcctcccaaaatgctggaattacagtcgtgagccactgcgcctggctctttttactttctttaatgtgactactagaacattttgtttgtttgtttatttatttattgagacagtgtctgactctgttacccaggctagagttcagtggcaccatctcagctcactgcaatctctacctcccacactcaagcgatcctgccacctcagcctcctgagaagctgcgactaaaagcacacaccactacgcctggctaaattttgtattttttgtagagatgaggtttccctcttgtcacccaggctggagtgcaatggcgcaatctcggctcactgcaacctccatctcccgggttcaaacgattctcttgcctcagcctcccaagtagctgggattacaggcatgtgccaccacacctggctaattttgtatttttagtagagacggggtttctccatgttggtcaggctggtctcgaactcccgacctcaggtgatctgcccgcctcggtataccaaagcgctgggattacaggcgtaatccactgtgcccagcagagatggggtttcacttttttgtccaggctggtcttgaactcctgagttcaagcaatctgctcacctcggcctctcaaaatgttgggattacagttgtaacccactgcatcaggctagaaattttaaatgtggcatactttggatttccattgggaggctctggtttaacactactgtgcctccagagacaacacatcacacctatttcctctgcccagcaggtggaaacccccagggccactgtggacccacagcaaggcagagagaagtcttagaagagccgaggtggggaggagagctgtagctgtccacccactaactggaattttctttcttttttttttttttttttttttgagacaagggctcgctttgtgggccagctggaatgcagtggtgcaatctcggctcactgcaatctctgcctcctgggttcaagcgattctcctacctcagcctccctagtagcttggattacaggcacctgccaccacgctcagctaattttttttttttttttctgagatggagttttgctcttgttgcccaggctggagcgtaatggcgtgatctcggctcactgcaacctctgcctcccaggttcaagcaattctcctgcctcagcctcccgagtagctgggattacaggcatgcactaccatggccgactaattttgtatttttagtagagacagggtttctccatgttgaggctggtctcgaactcctgacctcaggtggtccgcccgcctcggcctcccaaagtgctgggattacaggcgtgagccactgcgcctggccaacgcttagctaatttttgtatttttagtagagacggggtttcaccatgttggccaggctggtcatgaactcctgtcctcaagagatccgcccgcctcggcctcacaaaatactgagattgcaggtgtgagtcaccgtgcctggcctggacttttctttttaattgttaattattttttcttttaaatttttttttttgggatggagtttcacttttgttgtgcaggctggagtgcagtggtatgatcttggctcactgcaacctctacctcctgggttcaagcaattctcctgcctcagcttcccgagtagctgggactacaggctcctgccaccacactcagctaatttttgtatatttagtagaggcggggtttcaccatgttggccaggctgatctcaaactcccgacctcaaattatccacccacctcggcctcccaaagtgttgggattacaggcgggacccaccgtgcctggcctaattttttttttttttttttgccagtcttaactctgtcacacaggctggaatgcagtggtgtggtcatagctcactgcagtctccacctcccaggctcaagtgatcctcccgcctcagcctccgaagtagccgggactacaggcatgaggcaccatgcctagctaatttttgtaacgatggggtcttgccatgttgcccagggtggtcttgaacttctggcctcaggcgatctgcccccctcagcctccgaaagtgctaggattacaagcacgggccactgcacccagccactgacgggactttggattcatggtttggttccagaggtagcaggacctaactctccctggctggctggggcgggtaggggaaagagatggtttcaatatcttgaaccaccctgaactttggacctcctgaagttcaaggacctggagattgttgttctggatcacgatttaggagggggcggaggcgggggtggggtggacgtggcagaagttaactaggtctcaaccagcaggggcgtgtcctcacctcagggaaatggcaagtgtgactggatggaaaccagaaaccaaccggttatagattcaagtctcatcctttttacaattgtatgacattggacaagtaattgagcctttttgagcctttctgactctttattttcttttgagacggagtcttgctctgtcgcccagattggagtgccagggtgggatcagggctcactgcaacctccacctcctgggttcaagcaattctcctgtctcagcctcctgagtaagctgggattacaggtgctcaccaccatgtccagccaatttttgtatttttaatagagatggggtttcactatgttggccaggctgatcttgaactcctgaccgcaagtgacccacctgcctcggcctcccaaagtgctgggattacaggcatgagccactgtgcccggcctgactcttacacttttctgatcagaaactttctcccttggatcctttgaggccaggagtttgagaccaggttgggcaacatagcaaaaccctgtctctttttttttttttgagacggagtttcactcttgttgcccaggctggagtgcaatggtgtgatctcggctcaccgcaacctccgcctcccgggttcaagcaatcctcctgtctcagcctcccgagtagctgggattacaggcatgcaccaccacgcctggctaattttgtattttttagtagagatggggtttctccatgttggtcaggctggtctcaaactcccgaccacaggtgatccatctgccttggcctcccaaagtgctgggattacagctgtgagccaccacgcccggcttttttttttttttttgagccagagttttgctattgtcacacaggctggagtacaatggcgtgatcttggatcactgtaacctctgcctccctggttcaagcaattctcctgcctcagtcccgctgagtaactgggattacacatgcccaccaccacccccggctaatttttgtgtttttagtagagatgttgggcggggtgggggggggggggtctcaccacattggccaggctggtctcgaactcctgacctcagattatccacgcgccttggcctcccaaagtgttgggattacaggcatgagccgccgtgcctggccaaaaccctgtctcttaaacaaacaaaaaaggttaggtgcggtggctcacgcctgtaatcccagcacttttggaggccaaggcgggcggatcacttgaggtcaggagtttgagaccagcctggccaatgtgatgagaccccatctctactaaaaacacaaaaattagtgaggcatggtggcgggcacctgtagtcccagctactcgggaggctgacacaagagaattgcttcaacccgggaggcggaggttgcagtgaggtgagatcatgccactgtactccagcttgggcgacagagcaagactgtatctcaaaaaataaataaataaaaagtaaaaaataaaaattagttgggtgcagcggcacccacctgtagtcctagctactaagtaggctcaggtgggagaattgcttgaaatctggactttaaggccagcctgggcaacatagtgagatccatctctattttatttatttatttatttgagagagggtctggctctgtcacccaggctggagcgcagtggtgtgttcatagctcactgcagcctcgacctcctgggctcaagagatcctcccatcccaacctcccaagtagctgggaccacaggagtgtggcaggctgggcatggtggctcacacctataatcccagcactttgggaggccaaggcaggtggatcatttgaggccaggagtttaagaccagcctgaccaacatggagaaagcccgtctctattaaaaatacaaaattagccaggcgtggtggcacatgcctgtaatctcagctacccagaaggctgaggcaggagaatcgcttgaacccaggaggcggaggttgcagtgagccgagatcacaccattgcacagagcgaaacctcgtctcaaaaaaagaaaaaaagaagtgaggtctcactatgttgcccagccttgtctcaaactcctggactcaagtgatcctcccgtcttggcctcccaaagtgctgggatttaaaaaaaaaaagtagccaggtgtggtggcactcacctgtggtcgcagctacttgggaggctgaggtgggaggttcaattggaggaggtcgagggtgcagtgagctataatgggaccacggtactccagcctgggaaacaaagtgagacactgtctcaacaacaacgacagaaaaccaaaccaaaacaaaaaagaagaaaaagaaaaaagagactgcctctgtctttccagttttggtttccttccttccttccttccttcctttttctctttcttctttttttttttttgagacagtgtctcgctctgttgcccaggctggagtgcagtggtgcgatcttggctcactgcaatctctgcctcccgggttcagaacagcaattttcctgcttcagccttccgagtagctaggactacagacatgcgccaccatgcctggctaatttttgtatttttagtagagatggggtttcaccatgttggccaggctggtctcaagcccctgacctcaaatgatccatctgccttggcctcccaaaatgctgggattacaggcgtgagccactgtgcctggcctgccactttctctacctctcctaagcagccactcccctcacacaagagaattgcttcaacccgggaggcggaggttgcagtgaggtgagattgtgccgctgtactccagcctgggcgacagagcaagactgtatctcaaaaaaataataataataataataaataaaaattaaaaattagttgggcgctgtgaaacccacctatagtggcccactgcgcctggccatccagttagaattaagagtggtctctccgggcgtggtggctcacgcctgtaatcccagcactttgggaggctgaggtgggaggatcacctgcggtcgggagtttgagaccagcctaaccaacatggtgaaaccccatctctacaaaatatacaaaattaggcgggcatggtggcgcatgcctgtaatcccagctacttgggaggctgaggcaggagaatcgcttgaatctgggaggcggaggttgcggtgagccgaaatcgcaccactgcactcctgcctgggcaacaagagcaaaactccatctcaaaaaaaaaaaaaaaaaaaaaaagtggtctaatctttggctgttttccatctggcctccaggtggcgctgtcgactgactccttggcttgttcaggctgtgcaacctcaggtaaaccaaggcccccgggagcctggagcttgggacactaccttgagcaaggccctggacctaattttgtggagttccaaatctaatttgattgtccaattgatttacttttttttgtttgtttgttttgagacagggtctcactctgtcgcataggctggagtgcagtggtggtgcgatctctgctcactgcaacttctgccttcctggttcaaggaattcttatgcctcagcgtcctgagtagctggggttacaggcatgcaccaccacgtctggctaacttttgtatttttcgtagagacagggtttcaccatgttggccaggctggtcccgaactcctgacctcaagtgatccacctgcctcgggctcccaaagtgctgggattataggtgtgaatcacggctcccggatttttttcaaaaatttcaaaatttattatttgtttgagacacagtctcactctgttgcccaggctggagtgcaatggggtggtctcggctcactgcaacctccgacccatggggtgaaggggttctcaagcctctcaggctcctgagtagctgggattacaggtgtgagccactgcacccggccgaagttctagattctttttgtttgtttgttttgagacgaagtcttgctctgtcgagatctcggttcatttcaacctccacctcccaggttcaagcaatcctgctgcctcagcctcctgagtagctctgactacaggcacgcaccaccacgcccagtttgtatttttagtagagacagggtttcaccatgttggccaggatggtctcgatctctttctttttgttttttgagacggtatctcgctctgtggctcactgcaacctctgcccaggttgaagcaattctcccagtagctcaattactacaatggtggggattacaggaacccaccattatgcccggctaatttttgtatttttatagagactgcgtttcaccattttggccaggctggtagtgaactcctgacacctcaagtgatctgcccgcctcggcctcccaaagcggtgggattacaggtgtgagccaccgctcccagcctcgagttctagatttgttaatcagttacagttttctcacctttggctgtttgccagctggcctccaggtgacgctgtcgacctgcctcctcctccacttgtacagactgccacctcaggtcaaccaagggcctccaggccgtccctggagcctggagctcgggacaccccattgaacaaggcccgggacttaatcttgtgcagttttgaatctaatttgattgtccaattgattgattattatactgtggtctttgattggacaaggcggtccttgagactcaggaaacacattttggagaagaaggtgcctgggcacccttagaacatttttccaagctgggcattgtggcatgtgcctgtagtcccggctacttgggagtctgaggcaggaggatcccttgagtctacaagtttcaggccagcctgggtaatataacaataccctgacttaaaaaaaaaaaagtgcttgatgtaatcccatttgttgatttttccttttgttgcctgtgcttttggggccttgcacaaaaaatctttgcccagaccaacatctgagcattttcccaatgttttcttattttccttctttctttcttttttctttttttttttgaaacagagtcttgctttgttgccaggctggagtgcagtggcgcgatatcggctcactgcagcctctgcctctcgggttcaagcaattccactgtctcagcctccagagtagctgggactacaggcgtgcgccaccacgccaggctaatttttttgtattttagtagagatggggttttaccatgttggccaggatggtctcgaactcctgacctcgtgatccgcccgccttggcctcccaaagtgctgggattacaggtgtgagccacctcgcccaggcttcttttttgtttgtttgtttcttttgtttttttttgaggcagagtctcactctgtcatgcaggctggagtgcaatggcacaatctcagcacactgcagcctctgcctccccggctcaagtgattctcctgcctcagcctcctcagtagctggaattacaggcacccactactgtgcctggctaatttttgtgttcttagtagaaatgtggttttgccatgttggctaggctggtttttttttttttttttgagacagagtcttgctctgtcacccaggctggagtgcagtggcgcgatctcggctcactgcaagctctgcctcccggattcacgccattctcctgcctcagcctcccgagtagctgggactacaggcgcccgcaccatgcctggctaattttttttttttttgtatttttagtagagatggggtttcaccgtgttagccaggatggtcttgatctcctgacctcgtgatcagcccgcctcggcctcctttcaaagtgctgggattacaggcttgagccaccacacccagcccaggttggtattgaacttctgacctcaggtgatcctcccacctcggcctcccaaagtgctgggttacaggtttgagccactgcgcccggcctctttggttttttgtttttttgtttgtatttttgcgacagggtctctctctgtcatccaggctggagtgcagtggtgcaatctgggctcactgcaacctctgcctaacaggctcaagtgattcttgtgcctcagcctcccgagtaactaggactacaggcacgagccaccacacccagctaatttttgtatttttgtagatgtggggtttcaccatgttgcctaggctagtctcaaactgctggactcaaatagtccgcctgcctcaaccttccaaagtgctgggattacaggcatgagccgtcgcgcccggcctccaaagtttccttctaggagtttcatagtttcaaatcttagatttaggtttgtaatccattttgatttgatttttgtgtgtggtgagagataggggcctagtttcattcttctgcacatagccagccagttttccgagcaccattttattgaagaaactgtcctttccccagtatatattctttttttttttttttgagagacagtcttactctattgcccaggctggagttcagtggcacggtctcggtgcaacctctggctcccgggttcaagtgattctcctgcctcagcctcctgagtagctgggattacaggcgcccaccaccacatccggctagtttttgtatttttagtagagactgggttttaccatcttggccaggctggtcttgaactcttgacctcaggtgatgcacccacctcagcctcccaaagtgctgggattactgacgtgagccatggcaccccacctaaatatttatatttaagatgacacatatcccaagtacacttgatttgatctttacaaattatatgaatgtattaaattatcacatgtacccccaaaactatgtacatctatgatgcatcaataaaaaaaagtattgagtgtagtggctcatgcttgtaattccaactactcaagaggctgaggtggaggatcgtttgaggccaggagttgcagaccatcctgggcaacatagcaagatgcagtttgcacaaaaaattgctggatgtggtagtgtgcacctgtagtcccagatacttgggagactgaggagggaggattggttgagcccaggagctccaggctgcagtgagccatgatcgcgccattgcactgcagctttgatgacagagcaagaccctgttcatatatatatatatatatatatatatatatatatatatatacacacataaatgtccaaatatatatatatcagagtgggcaggagggaggtcgccttttgcagggctgcagggacaggtatgagagaaccaagagtgggtgagaggggctgggcctgatgtaaacgtgtgcagggctcgtaggggcctggggctgggggaagctcacagggggagaggtagtaggcgtgacgggtgtgacaggagaccgcagcgtgggaccggccatcattccaggcagggcaggggcggcagagacaggagcccagatggaacgtaggcaccctatatagcggacgtggctgtcatcaccgattcaggacgtgggtgggatgacattggtttccgtgtctgtcccctctgcagtctctcctccgcgatggctgcccctgtctgctcatcctcacctggccttcagcaggtgctcagctgacatcggtgagggaatgggagtgattcgtcatcacagtaaccgtgtacttcaggtaaacgctcagaaggaagccagttcccacaggactcacagtgggagacagagcggagcgtccagtgcttcctcggctagctgtatcccacgatgccgggtcatttgcggacacagtctgcacctcctttatcgcttgtgttactgatgtgggttgaatagcatctgctttagtctgtttggactgctataacaaaatatcgtagactgggggattcatgaacgacagaaacgtgtagctcacatttctggaggcagggaagtccaaggataggatttttttttttttttttgagacggagttttgctcttgttgcccaggctagtgtgcagtggcgcaatgttggctcactgcaacctccaccttccagtctcaagtgattctcctgcctcagcctcccaagtcactgggattacaggcgcccaccaccatgctcaggtatttttttttgtatttttagtagagacggggtttcaccatgttggtcaggctggtctcgaactgctgaccttgtgatccacctgcctcggcctcctagagtgctgggattacaggcttgagccaccacgcccagccctgactttttttttttttgagacagaggttcgctcttgttgcccaggctggagggcgatgatgcgatcttggctcactgcagcctccgtctcccaggttcaagcgattctcttgtctcagcctcctgagtagctgggactacaggtgtctgccacaatgcctggttatttatttatttatttttgtatttttagtagagaaggggtttctccatgttggccatgctggtcttgaactcctgatctcaggtgatccgcctgcctcggcctcccagagtgctgggattatgtgtgtaaaccactgtgcccagccaaatgtctgctattgtaagccacccagcctgtgataatttattacagcagccacaggaagagactaatacaactcctatttctttaattttttattttattttatttttttgagacggagtttccctctgtctcccaggctggagtgcagtggcatgatctcggctcactacgacctccgcttcccaggttcaagccaattctcctgcctcagcctcctgagtagctgggattacaggtgcccgctaccacacctggctgatttttgtatttttagtagagatggggtttcatcatgttgtccaggctggtcttgaactcctgacctcaggtgatgcacccacctcggcctcccgaagtgctgggattacaggcatgagccaccatgcctggcccaactcctatttctttaatttttttttgagatgggttcttgctaggttgcccagtctgctctcaaactcctgggctcaagtgatcctctcgccttagccttagctgggactacaggtgcttgctaccacacctgacttctttaattttttttttttttttttttttttgagatgatgccttgctctatctcccagactggaggctctgtcacccaggctggagtgcagtggtgcaatcttgtctcactgcaacctctgcctcccgtgttcaagcgattctcctgcctcagtctcctgagtaggtgggattacaggcacccgctgccacacctggctaatttctgtattttttagtagagacggggtttcaccatgttggctaggctggtctcgaactcctgaccttgtgatctacctgcctcggcctcccaaagtgctgggattacaggcatcagccactgcgcctggccactttttttttttttttaacttgaaacattttatctttttttttttttttgagatagggtttcgctctgtcacccaggctggagtacagtggtgtgatgacagctcactgaagcttcaacctcctgggctcaggtgatcctcccacctcagcctcccaaaatattggattataggcatgagccactgcacctggcctgttttatcacttcttttaaattttttttttgagaaagagccttgctccgtcacccaggctggagtacagtggtgcgatctcggctcactgcaacctccgcctcccgggttcaagcgattgtcctgcctcagcctcccgagtagctgggattacaggcatgcaccaccacacccagctaactttgtatttttagtagagatggggtttctccacgttggtcaggctggtctggaactcccgacctcaggtgatctgctcgcctcggccttccaaagtgctgggattataggcgtgagcctctgtgcctggcccagttttttaaatttatttatttttttgagacagagcctctctccatcgcccaggctggagtgcagtggtgtgatcttggctcactgcaacctccagggttcaagtgattctcctgccttggcctcctgagtagctgggactacaggtgcacgccacctcccctgtctaatttttgtacagtagagacggggttttgccatgttggccaggctgttctcaaactcctgacctccatgatctgcctgcctcaggcttccaaagtgctgggattacaggcgtgagccaccgtgcccggccctgttttatcactttaatcattggtatctgtaagagactggctttgctgggctggtggggctttctccaatgcacagtgaaataaatgcagcttcctggctgggtgtcctgaccccatcctctctgcttccgggtatttccctaaagttgagccttcaccccagcgttgccctgagttcctgaggctggggttccagtcctggaagctggggtgctctggctgggccccctgcacagtctgggctctctcacaagtcctccagcagagcgatgtcacccttccacgtccccaccccagttctctgacggcagctgaaggggatcaggatatgttactcttaaaaatatatcacttagagaccgggcacagtgactcacgcctgtaatccagcactctgggaggtggaggtgagtggatcatttgagctcgggagttcgagaccagcctgggcaacatggcaaaactccatctctaccaaaaatacaaaaaattcaccaggcatatggtggcatccacctgtggtcccagctacttgggaggctgaggtgggaggatggctcgaggctgcgaggctgaggttgcagtgagccgagattgcaccactgccctccagcctgggtgacagagcaagaccctgtctcaaacaaacaaacaaacaatctattatctatctatctatctatctatctatctatctatctatctatgtatctatctatgtatctatctatcaactttagcataagaattattctgagctgaatgcaatagaaaatcagtagatggccaggcgcggtggctgacgcctataatcccagcactttgggaggccgaggtgggtggatcacctgaggtcaggagttggagaccatcctggccaatatggtgaaaccttgtctctactgaaaatataaaaaattagctgggcatggtggtgggaacctatagtcccagctactcgggaggctgaggcacaagaatcccttgaacctgggaggtggaggttgcagtgagtcgagatcctgacactacaatccagcctgggcaacagagcgagactctgtctcaaaaaaaaaaaaaaaaaaaaaaaatcagtagaggcagaaagaattctctgctctctacttttctgcctcaaagccaggcataaacttctctttaagaaggtgacataaggctgggcgtggtggctcactcctgtaatcccagcactttgggaggccgaggcgggcagatcacaaggtcaggagatcaagaccatcctggctaacacggtgaaaccctgtctctactaaaaatacaaaaaaattagctgggcatggtggcgggcacctatagttccagctactcaggaggctgaggcaggagaatggcgtgatcccaggaggcagagcttgcagtgagccaagattgcaccactgcactccagcctgggcaacagagtgcgactccgtttcaaaaaaaaaggtgacataaattttcctttgtggaggtatccccccgtctccttaccagggagagcagaatgactcctatcactgcagatagtcagtcccaagatgagtctacataaacaaaccttcctaaaataactctctgtctccctctctctcttttttttttggaacagggttttgctctgtcacccaggctggagtgcagtggtgtgatcataggtcactgatgccttgacctcctgggttcaagtgatcctcctacctcagcctcccaagtagctgagaccacaggcatgcaccgccatgccgggctaacttttgtattatttatttatttattttttgagacggagtttcgcttttgttgcccaggctggagcgcaatggcatgatctcggctcactgcaacctccacctcccaggttcaagtgattctcctgcctcagcctcccgagtagctgggattataggcatgcgccactacgcccggctaattttgcatttttagtagagatggggtttttccatgttggccaggctgttctcgaactcccgacctcaggtgatccgcccacctcggcctcccaaagtgctgggattacaggcgtgagccaccacgcctggccaatttttgtattttttgtaggaatggggtttcaccatgttgcccaggctggtctcgaactcctgggctcaagtgatcctcctgcctcagcctctcgagtagctgggaccacaggcatgtaccactacactctgcttttttttatttttagtagagacaaggtcttgccatgttgcccaggctggtctcgaactcctgagctcaagcagtccacccaccttggcctcccaaagtgctggggttacaggcgtgagacaccgcgcccggccaatgcctgggcttttgcacctcagggcatttctttttcttttttttcttgagtctcgctctgttgcccaggctggagtgcagtggcatgatctcggctcactgcaggctctgcctcccgggttcacgccattctcctgcctcagcctcctgagtagctgggactacaggcgcctgccactatgcccggctgattttttgtatttttagcagagacggggtttcaccgtgttagccaggatggtcttgatctcctgacctcatgatctgcccgcctcggcctcccaaagtgctgggattacaggcttgagccaccgcgcccggtcacctcagggcatttctatgacaatcatgcccttccaaccttccaggtgatgaggctcaagcaatggcctgagagtatgtgagactggggactaggccaagctccgcccctcttcctcatcccctgatcttcccaccctgtgtctcctgggcaactaacactctagcctgatgatgtgcactgtggaggccttgggtctacctcttggcactcgggcatagacttggcctttgagttcagggctcatggggggcttcggtagtgaacttcattcctgggaggacagatggctgcagcctcattgacagcagagggaattgcacaaaccctggcttactccagtggctcctggacacactcaaccccagcaccatgggagggggaccagaggccagctctgcaatggatgggcagcttgtttagaagcctgtggtggttgccagattgcctggttagaaagttaaacccctccctccctcccttccattccatttttttttttttttttttttgagacgtagtctcactctgtcgcccaggctgcagtgcagtgacgcaatctcagctcactgcaacctctgcctcccaggttcaagcgattttcctgcctcagcctgccaagtatctgggaatataggcatgcaccaccacacctggctaatttttttatttttagtagagacagggtttcactatgttggccaggctggtctcaaactcctgacttggtgatctgctcaccttggcctcccaaagtgctgggattacaggcgtgagcctctgtacccagccttaaaaaaaacaaacttttttttttagagacagcgtcttgctatgttgcccaggctggtcttgaactactggcctcaagtgattctcccaaagtgttgagattacaagagtcagacaccgcactcgacctcaaaactttgacttctcgttggactgatcttttcctagatgccattattttatttatttatttttacttttaatttttttagagatgggatctttctacgtcacccaggctggaatgcaatggttattcacaggtgtgatcatagctggtcttgacctcgtgggctcaagtgatcctcctgcctcagcctcctgaacagctgggactacaggtgtgtgccaccacatttggcttaccattattttagaaggacttacacctgtcttgctatctggagtctgcagatttcttacccaaggtaagctcaagcagggcctgttgtctggaacaagacctgttcaaaatgtttgccttaatgctacagtagtaatggtgatagtcaatagtagcttgctatgggtcaggtactgttgtgagaacagaagctctcaaaggggtattggactctggggatggctgaaacacttcgtgggggcgggggttggtgtccacgagaccaaattattattattaattatctaagatggagtcttgctctgtcacccaggttggagtgcagtggcacgatcttggttcactgcaacctccgcctcctgggttcaagcaattctcctgcctcagcttcccgagtagctgggattacaggcacccaccaccacgcgtggctaatttttgtatttgtagtaaagacggcgtttcactatgttggccaggctggttgtgaactcctgacctcatgtgatccacccacctcggcctcccaaagtgctgggattataggcgtgagccaccgcgccctgccttttttttttttattttgagacaagagtctcattccgtcactcaggctggagtgcagtggtgggatcttggctcactgctaacctccgcctctcaggctcaggtgattctcatgcctcagcctccggagtagctgggattacagtttgtgcaaccacgcatggctaattttttttgtatttttagtagagatgaggttttgccatgttggtcgggctggtctcgaactcctgacctcaagtgatccatctgccttagcctcccaaagtgctgggattacaggcgtgcatgatgcccggcctccttgtcgctttcaaacagtgcttctaggagctaacaaagaagtgcctctttgtatgattccccaagagagacccacccaggcagcacctagccaagggacaaagaccactcctatccaaaagccctttgattcaacttttttttattttttttttctttttgaatgtcatgcaataattcacagtcccaagcccacggttttcaaacaaggtaggaaaaaaggaaaaaagaagcaaaggaatcggtggtgatggtgggtttttcttcttcttttgttgtttcaagcaggaccaaatgtcagaaaaaaatgcctcttttctcaatcattaatttttttgtcctttttaaaattgtttattgttattattatttttttaaattgatttctgcaggcagtaatagtagggtttggtataaccggcaagcactcttgtgtgtgtctgagaacgtgtgtgggtgtgagtgtgtctggtggtgggtgtagggcactgggattctggttccttctggcttctttgccgcactcggccaccagctgtcttcatcagggaaaggaaagattcaattgagatgataaaactcatcaatagaagctatttttttctccccgttttttcttttaaaaatgtttttttttttttttttttttttttttttcatgttccccaaagttctccaaaaatggctgagttaattcaaatcccttggctgtgtggtttgtctgctccctgcctcccacccgagagcccctgtcgtgggtggggggatcggggctggttggggggcgccgtggctgcccaggagggtctcttttggccgagggtctctgcgggacacccttgtggcccagccctggcctctccagagtctggggtctcccggctggccctctcccgggccctctgtgctgggcccccgcggcctctgcgcggctcctcgggtggggtgtgtgcgtggggtgcgtggggggccgggcgggcgccacctcgcccgggcttagcaccaatcatcgtcactctcgctgtagggttcgtgcaggcccttcctggagcccggcccgcggggcctggccagtccgtgcgccgggtagtagccgttggggagtcgccggccgtgccgagaaggcgaggcgcaggccgggcccgaggcccggggagtcctgggcgagcgcccggtggcgcccgaggacgcgtgtcgtacggggggtggcgcgtcgtaggccccggccatggcctcctcgccgcccccgctgcccgggccatcggcctcgtcgtagtcggagccccggtagtagccatggtgccggggacccgggggcccctcggacacgtgcgggccagatgccggccaccgggccccgccgtgtcgacaggccctgggggactcgctccgggccgggcctgggacccgcctctccatcctgggcgagcggccgctgctgtggccccccgtgggcggccgatctccggccagaggctcggccgtggggcctgggtacctccgagggccgctggtggccgcccggcccggcctggccaccgcctgctgctgctgctgctgctgctgctgctgctgctgctgcgggggccccgagccgccggccttacggatcacaggggaataggacacgtgtggccggggggtggagggggtctgggggagctggcggcggccccgccgcggagtgctggtaccagatgttgagggggctgggcttccacttacggaactactgccctacacgaaaattgaaacaaaggaaatcaaaaaaaaagatacaacaaaatcaaaggagacacgggattgggaggaagagaggggagcgaagggagaggggccgggaggagagggaggagggggagggggaggaggaggaggaggaggagaggggggacacaggacattgaatggaaaaaagcaacagccacagggaggagggaggggaggagggggagtgagacagggaggggaggagtcgaaaaccaacacaacaaagtgaaaagagaaatgagaaatggagttttgtaagtttcggggttaaaaatagcagaagtttcaaaaattactcacaggcgtccagaggacagaaatcataattgaaacaaaaacagaagccgggttaaaggaaagtgaaaggtcgggcggcacggcccagaactcaaatatgatccacaaccgaggagcaagcagctgcgggcggcggggagggggcggcgggtgggcaagggggctggggggacagcataggcagctggtgtggtggggatccgtgtccgctccggccgccgggcaccccggtggcttgggggcaggatgggaggtggtcacagccgggatccggggacctttgcctagagtggctgttggatggggtatccccttctctcctccccgcctcccggccgagcccagcctggggtcacttgcagccgcacccacctgccggtgcgccatgtgctctcggccctcgctgggcgagcgggaccagcgctggtcccgagcccgtgcccggccgtggtccggccgttcctgggcatagcggtccttgtcggggggcgggggatggtggtggtggtggtggtggtggtggtgctgtcgatgcttccgatccttgggccggccccgctcctggtcccgctccttcgacggcaggtccccggattgggtggtcatgctcaggtctgtccccaagcctgggccgggtgagggtcagacagacacacaggtggtcgtgagggagaggtggggcagatgcacacacaggaggccacctggaaggtgtgggggccctagagatcccctgaaccgaggcaggtcagtgggttggggggagggggtagtacccaggttcctgcagctgctgcctggccccctctgtcccctctccatggaggcctctccctttcttcttccttagtgtctcctccgccctgccttctcctcccctctcctctcctctgttctgcttgtccctgagcaccacagggctgcccacctgtgtccacatcggtgtagcggcccagggagcgctcagaggcgcggtggctgcggtcgcggcgccgctggtggtgccgctggttctcctcgggcgggacccgctccagcgagtaatcgtccaggcgtcgggccttggggcccagcacggaggctgaacgcttcatggggctggtgtctgagatggtctgggggaggggacaggccggtgggctggggtcagcagctagcaccaagtggtcccggtccttcctgccccattgtggcagcctggtggtggccttcggtgactgcggtgtgaccatcctggggcaggggccaggggatgccatggggccttggctccccctgatcaatcagggctctgggtgtggccaggcctctgagggtggagcctgaggattcctctgtccctcagagacaggactgctccttttgagcccatcctgggttctgaccagaaagatctgatcctcactctccagtcctgggggcccagccacagttgggcaggctcaggctggccagagggaagccctctccacatccagggtgcaaacctgggagccctggactgccgcactcatccctgccccagcttgctctcctgggagggtgagaagcctccgactgtggctggctgacctatgggctcaggaccaggtgcccggcatggcagctttgggtcctcccggctaacggggctgtgctcgctgcccccacaagtctgagtccttctggtgaggcccaagctagggagctctgggtgggggtgggggatacccaggcactggaggctctgggggcccactcttttccctggtgcttcatccctgggtcaagccctgacacacaggtttctctgcagcaggcagaggagggaaggagggagatggggcagacgcccgcctcccagggtccagcccagctgagcgctggtggccctgctccaggtaggagctgcaggaccaggggttggtggtggtgtcaggagaagaagccccccagaaagaggtgcagagtgggccaggctcttggagagccagtgtcctccggcgtggggggccctgaagaaaagggggtaggggtgaggatggggatggccccgcccaccagggcttatgggtgaggggcacacacaggacaccacacacaaggattgggctccatggaggggagagggtgcgattgccaaagaaagggtggggtccggggacggtgagagatgacgggactccctggagggggggtggggaggaagagggggccggagccctgctgggcgctgggcaggcgcggtacatacactgaggttattcccacgtggccggccccttctcctctgtcacagccccatgggatggtgcacacagaaaaaacagaaagaagaaaataaatataaaaggcaagagggagagtgaggaggtggtgcatggagaagaagccaaggaggggagtggcactggcatcaagagaaatcggagggagaaggcagggaggaaaagaaaagttaaagtcctggcgggtgggtgtcccaggcccccggggctgggcgtcctctattcccatgggtacagaggagacagacaggagatgcagacagacaaatggcagaggcatgggaccgaaagacaggacggcgcagcctcgagcccctggccctgggctctgcctcatgcgatgcacaccccaacccctggctccggccgatgctcaaagcttccatgtggtggccgtcagctgggcttgtcccaaccctctcctggggcccagcagctcggtcctgagggagcagcagcatgcacgctgggtgctccccaacccacgttcccagcagccagaggccaggccctcaggtgaccctggtccagccaggcacagcacagcctcctgccccgtgcagacgccacacacggcacacggaaagctcgccacagccacacatgccacgcacccgggccaggctctcacagccatgccctgttctcctccagaggcgggctgcgtgcatgggcccccgctgttcaggccgggtgggcagccagctatgcctctgggccctctgtcccatgagtccaaggcaacgggatcacctgcaggtgggcctggcagctgggtgaagcggccacacacagacacacatcaagcacacacccctgtgccccccaatgactcccacagagaccagacagaaaatacgagcccagctgcccccagacccaccccagactctgctactgtatcctaggacctgccaagttcccatatgcagacacgtgtgcacgtacatgtgtgcatgtgtgagtacatgtgcagtgtgtatatgcccacgtgcacacacgtgtgtgtatgcaagcatctgagtaggcgcacagctgcacatgtgtgtgcatgtatgttgagcatgtgtgtgtgtgtttgtgtaggggtgatcttcgtggcaggtctcagctggccctgttgaaccctgctgcacccacaaatcttccacaacctcccctgtctgcagcctccaaccagggcagccagagaccattttgcagtggccactgccctctgccccagggggagcactttcctctctgtcctctgtgagggaggagggtctgcaggtgctccaggtgtgaccaggtggtgggtggggcctgcagactgcttcagagactgaaggagtccctacccaggcctgagtccggcagggaggggatgcactgggctgcttgtgggggggcctggccctacccagtgcagagtgaggggtccagccccagggcagtggtgaaagccctcacctggttctctgcagggaggcggggcatggaggcagcccggccctggccttccatggggaggtagtgctcgctgtcggagtagccatctctgcccatctctcgcatctccacggactgcggagcagatggcaaagccagatgagctctggggcctgacctccagatccctggtgtctgcagagggagggagctgcaggtgtgtgtgtgtggggggcccagatcccttccacctgaaccacccgggccctgggagccattggggagttgggggacagaggcacctgagagttaggctggctgttgggcatgtcggtaggggggccttgttccggactccatgtgcccgtcttctggaacatctcctgggcacgctgggtcacccaggacgggctctccttgaggccgctttcgtgagccatcctgcatgggggacagaggccggggtagcagtgggcgcttgggcagcttccagaacgtggggaccacggcacccccacactccacctccctggcaggggtgacactcacagggctcctcctgggtccagctgggtggaggggagggcgttctggccaggtcccccttcctgcgttggggacgggggctccatgcgctggaacatgaggggtgtccggtcctggggaatggggcagagagcagtgtgtggacaagggtggggtggtgggacggtggtacccagaaggcattgcgacatccccagtatacacacacacacacacacacactctctcaggtctcatccatctagacccttccaattccacgcagaactggaccacttctcactcctccacccaagtcatagccccagcctggtcccacgtcctcatctctcactgcaggcaccttctcccaggtctcccgctcctaccttcaaccccactgttccacaagagccaccagagggcgcccatgagcacttgagtcaggtcctatccctcctttgcttagaaccctccatggctcccacttgcttggggaaaaagccagagtccttcctgcagctcccatggccctgaaggatctgccctgtcacctccttgcccttgtctcctccctgctcttttccaccacactggcctctttgctgttacccaaacaacccaggcacggtccagcctcagagcctttgcactggctgtttcctctgcctggaacacccttccaggtattgcttagctcactccctctccccttttccttcaagcctttgctcacatgtcactttctcagggaggctccccaactacccatttcccaccgcatcccctcctcccctggatactcctatcttctggattcttctccactttcccccacgacactttctttctctttgctggatgttgcacgattcagtcatttgctaccattggcatttccccacttggaatgtctgctccctgagggcagggattctggcctattttccccatgggtgcatccccgaggactgagaacagcgccctgcacacagtaatactcaataagtgttggtggagcagctgaatgaagaatgaatccacatgatgtgtccttggcaagaacttttttttttttttttttttttttttttgagatagagtcctgctcttatcacccgggctggagtgcagtggcttgatcttggcttgctgcaacctccacctcccaggttcaagtgattctcctgcctcagcctcccaagtagctgggaccacaggtgcatggcgccacatgcagctaattttattttttttttgtagagatatgggtctttctatgttgcccagactggtctcccactcctggcctcaagtgatcctcccatcttggcctcctaaatagctgggactacaggtgtgcaccaccatgcctggctaatgttttattttgtagagatggagtctcactgtgttgcccagggtggtctcatcctggtctcaaacgatccctctgccctggcctctcaaagcactgagattgcaggtgtgagctgctgtgcacagcccctacttttcagggacctgccctggggctcagccaccctcatattccagttggttcccgtggtgacatgcaagccactgtccccagcccagatgtccccagagcggcgaacagcgcacctgctcctcgcgcatggcctgcagcttcttggccttgctctgccggtagtactccatgatcatcatggctgcgtagatcttccccacggtgaggtccgtggctgggggcacacacacggtgagctcaccaagggcaggcctctttggggcccttgtcctgggtccctgtgtataccagcccaggccaacactctccccaggcctcccctttccctccccctccatctgtcctggtggattggatcccagggctgggctcagctcttacacttgtgaggtgtgaccagcaggtctagcgtcttctgggacagattgggccaaatcgccatcatctccttccgcagctcagcgtccatctgctgtttgtcggctcctcctgcaatgggggtgtagacagaccctgactgcctgcctgggtgtcagctggactctgggtcagctgcaaagccataggctcccgagaacgagaccccaatctttctggtccccatggggtctccagttccccaacggcctggcccagaggaggccctgggcagtgctgctggaatgaccttgtgggctctggttttcggtggggccaggaccatggagcagctgtgcaggagacagcccggcatggagaacagctgggcgacctgggtcccaatcttgtctcccagttatcggctgcatgacttaggttactctaccacttagtaactcagtttctccatctgtgaaatggagatgatagcaagagtacttgcctcacctggttgttgtgtgtgtgtgtgtgtgttttttttttttttttagacagagtcttgctctgttgcccaggctggagtgcagtggcacgagcttggctcactgcaacctccgactcctgggttcaagcaattctcctgtctcagcttcccgagtagctgggattacagacatgcaccaccatgcctggctaattttttgtatttttagtagagacggagtttcaccatgttggtcaagctggtctcgaactcctaacctcgggtgatccacacgcctcggcctcccaaagtgctgggattacaggcgtaagccaccgcgcctggctggttgttttttttttgttttttttttgagatggagtttcactcttgttgcccaggctggagtgcaatggtgcaatctcagctcactgcaacctctgcctcctgggttcaagcgattctcctgcctcagcctcccgagtagctgggattacaggtgtgcaccaccacgcccaactaattttgtatttttagtagagacggggtttcaccatgttggccaggctggtctcaaactcctgacctcaggtgatccaccctcctcagcctcccaaagtgctggcgattacatgcgtgagccaccgcgtctggcctgttttttttttttttttgacagagtctctctctgttcccaggctgaagtgcagtcatgtgatctcgactcactgttacctccgcctcccaggttcaagagattctcccgcttcagcttcctgagtagctgggactacaggcacgcaccaccatgcctggctatcacctggttgtttgatgatcaaagtaacgtgcgtgcagccttgggacagtgtctgccataggattattactgcagtgacccatctgttcaaggctgggacgccctggagcatccccaacagaggaagttttggttttggttttattttgatttttgagacagggttttgctctgtcgcccaggctagagtgccgtggcacaaacatagctcactgcagtctcgacctcctgggctcaagatcctcccacctcagcctcccaaagtgctggaattacagatgaaagccactgtgcgtggctcagaggaggtcttttcccctttcccaagtctccactgccacggacatgcccttggcctgcagccagtccctcgtccctcaccccagtcatggggtgagtcattaaagctctctgacggtgtttcctggccctcctacctgagtacatgggggggttcctcctgtggttggcagggccatgtgatgagtccttgctaatggggtgtgcaccatgtaatgtgccactttggggccagagcatttattattatttttattattgttattatttttgagatggagtctcgctctgtcactcaggctggagtgcaatggcatgatctcggctcactgcaacctccaccttcagagttcaagcgattctcctacctcagcctcctgagtagctgggattacagacatctgcctggctatttttatatttttgtagagacagggtttcaccatgttggccaggctggtctcgaactcctgacctcaggtgatctgcctgcctcggcctcccaaagtgctgggattacaggcatgagccactgtgcctggcctattattttttttaaaaatttatctatctatctatctatctatctatctatctatctatctatctatctatcatctatctatcgatcgacagggacttactctgttgcccaggctgtggcacaatctttgttcaccgaagccttgagctcctgggctcaagcaatccacattctgacagtcagaatgtcactgtgggctgctatttggatatgctaactgggtttacgtttaatatgctaattggttcaggcaggtagttggctctgccctcaatgcctggggtggggggcttgaaagaggatagggtccagcctggtcaacatggtgaaaccagtctctagtaaaaatgcaaaaattagctgggcgtggtggcgtgcgcctgtaatcccaactactcgggaggctgaggcatgagaatcgcttgaacctgggaggtggaggctgcagtggtgagttgagactgcgccactgcactccagcctgggcgacagaacgagactccgtctcaaaacaatacaaaacaaacaaaaccaaaaccaaaatagagattcttctgggcagagagaacagaggggtgggtgggagagagaaacagatggacagggaagagagagagagagacagagacagagagaatgagatggacttgccccctttctcccagtctccagcaatgaatggtgacaccatttttgagaatctgaagaatgaggttaatctgtaccccctttgcagccccttagcctgctggaaaggaagctcagtgtgcttagaaagtgagctgaactatgaaaagaaagcgcgttatgttctcctgagacccgcatctgctcaaagggctgccactgttatcactcttccattgttgtccccacaccctcttgaccttccgtaaccccgagagcctggctcagctgtggaactccaggatgaggcctggcacccactgaggacaagaggtggaggggctcctggctgagaaatctgggggatcattgtcttcagggaactgagtggcatctggggtacaagtaacaactgtgacagccaaattcagagacatctccaggagtctttgaaaccctcaggaagggaatccagtaggtgtcatagaagctggggtgctaagcagtaaggactagctcagtaggctagtgttgtccaaaccctgcacattccgatgaaaggactggcccattgacttgctcctgggaggtgatctctaagcctttgaaatgtcctgcctgaagagtgtctttatttagcagggggccttgggccacactgtatagttcattcttttttttttttttttttttttttaaaaaaaagagatagggtctcactatgttgcctaggctggtctcgaactcctggcctcaaacgatcctccagcctcagcctcccaaagtgctgggattataggcatgagtcactgtacccggccaatacagttcattctatttatttatttattttgagatggtgtttttgctctattgcccaggctggagtgcaatggtgcgatcttggctcactgcaacctcggcctcctagtttcaagtgattctcctgcctcagcttccccagtagctgggattacagccgcccgccgccacgcctggataattttccatacagttcattctaacaatgcgatttatcgttggggtcttgggccacgtggtatcagtttgacctctggagggactggagactgagtaactacgtcagccctgcctatatgacaaaccctcaataaaaaccctggggcaccaaggctcaggtgagcttccctggttggcagtacacggtgcgtgttgtcacacactgcagggagaattaagcgttgtctgtgcaactccactggaggcagacaactggaagctcgcacctggtgtctcctggacccttccccagatgcccttcctttgcgcattttatgtttttggaatttgtttgtttgtttgagacagagtcttgctctgttgcccaggctggagtgcagtggcgtgatcttggcttaatgtagctctatctcctgggttgaaaggattcttgtgcctcagcctctggagtagctgggactacaggtgtatgccaccacacctggctaattttctttttggacagagttttgatcttgtcacacaggctggagtgcaatggcacagtctcagctcactgcaacctctgcctcccagggtcaagcgattctcctgcctcagcctcctgagtagttgggattacaggggtctggcaccatgcctaatttttgtatttttggtagagacggggtttcgccatgttggccaggctggtctcaaacttgtgacctcaagtgatctgcccgccttgccctcccaaagtgccaggattacaggcgtaagccaccatgccaggccctttgcagattttttttttttttttttttctaatagagtctcactctgtccagcctggagtgaagtggcgggatctcggctcactgcaacctctgcctcctgggctcaagtgattctcctaccttagccttccaagtagctgggattactggcgccagccaccacgcctggctaatttttgtatttttagtagagacagggtttcaccatgttggtcaggctggtcttgaactcgtgacctcaagtgatctgcctacctcgccctcccaaagtgctgggattacaggcgtgagccaccgtgcccggccctttgcagattttaatctatattctttcactgtaataaactgtgagtataaaaacttttctcagttctgagttcttccagggaatcactgaacctgtgggtggttttgggacccctgaacacagattctcagagtgccacagaagctgagttacgatggcattacatacaaagagtgggggtgttgttagacccgttgtacaaacgaaggaactgtggtaggcagaattcaaaagctgcccttctgccaagattctgtttattcaaacactaatctagggaccattgcccaggctatgaagggactttgcagatataattaaaataccggaggcccggtgcggtggctcacgcctgtaatcccagcactttgggaggccgaggtgggcagatcacgaggttgggagatcgagaccatcctgctatcatggtgaaaccccgtttctactaaaaatacaaaaaattatccgggcgtggtggcacgcatctgtagtcccacctacttgggaggctgaggcagaatcacttgaacccgggagatggaggttgcagtgagccgagattgcgccactgcactccagcctgggtgacagaacaagactccgtttcaaaaaaaaaaaaaaaaagaaagaaaatgctgggcatggtggctcactcctgtaatcccagcactttgggaggctgaggcgggtggatcacctgaggtcaggagttcaaaaccagcctggccaaccttgtgaaaccccatctctactaaaaatacaaaaaaatttagctgggcgtggtggtgggcacctgtaatctcagctactcaggaggctgaggcaggagaattgcttgaacctgggaggcggagattgcagtgaactgagatcacactattatactccagccttggcaacaagagtgaaattctgtctcaagaaaaaaaaaaaatatcaagtcagctgacctcaaaatacagagatgatcagggtaggcctgccccaatcaggtgagcccttgaaaagcacagtattgtctctgctgggtggcagatggggaagtcagagagaatgagagcacatggaggattacatgcacttccaggagcaaaaagctaaaaagccagtgataaaacaagacctcagtcctacagccacaaggacttcaattctgccaacacctgaatgaacctggaagtagattctcccccagatcctccagagaggagcccagcttggctgacaccttgatttcagcctcgtgagaccctcagcagacagcccagtccagctttttggacttctgacctacaggactgtgagctgacaaataggtgtgtcttaagctgctatgtctgtggtcatcatatagctcactgcagccttgacatcccagtccccagtgatcctcccactccagcctcccaagtagttgggactacaggtgcacatcaccacacctggctaattttaaaattttctgtagagatggggtctctctgtgttggccaggctgatcttgaactcctggcctcaagtgatcctcctgccttggcttcccaaagtgctgggattacaggtgtgagccactgctcccaacttccttgtgctctctttaccttcactttgttcctggcattaacaatatctgtcctccacccctccagtcccccaccttccctgccacttcctccttgagtcttgccacgtggccttggctcttcctcccttctttccctcaagaccctggaaggcacatatgtctcgaggctcagtcttccctcctcctgacttactagtggtttcagctgggctcagcaccttcccatgtgtgggactatccacctgctcctctcccacccactccttttttctggtcccatttgttttttcttttctttctttctttctttttttttttttttttgagacagagtcttgctgtgtcccccaggctggagtgcaatggtttgatctcggctcactgcaacctctgcctcccaggttcaagtaattcttgtgctcagcttcccaagttgttgggattataggtgtgcaccaccatgcctggctaatttttgtatttttagtggagatggggtttcgccatgttggccaggctggtctcaaattcctggcctcaagtgatccaccttcctcagcctcccaaagtgctgggattacaggcgtgagcctcaggtccccgtttcttctggcaattgtgcgcctgtctctctgccctgctgtccttaatcagctgccaaatcacatcacatcccctttcgggcctccgaaatgcactccagacaggggacccctgacccctccgccaaagctgcactggtcaaagtgaccatgatgaccagtcacttgtgatccttgtcatccttggtctctgggcagtgcctgacacggttggtccccttcctcctgaagccgcccttttaaacatagaagctgcctccaggagcccacactgccctggtctctgcccgcctccctggcctcctcttcttctttccccctaatgatggagagtgagccctgagctaggtctttgggggaatttctcggtattttttatttttatttttatttttgagatggagtcttgctctgtcgcccaggctaaagtgcagtgatgtgatctcggctcactgcaatctctgcctcccgggttcaagtgattcttctgcctcagcctccctagtaactgggattacaggtacccgccaccacacctggctaatttttgtatttttagtagagacagggttttgccatgttgaccaggctggtcttgaactcctgacctcaagtgatccacccgcttcagcctcccaaagtgctgggattacaggcacacgccacgacacccggctaatttttgtatttttagtagagacagggttttgccacgttggccaggctgatctcgaactcctgacctcaaatgatccacccacctcggcctcccagcgtgctcagattacaggcgtgaaccactgtgcctggcctcaacaaaatgctgagattacaggtgtgagccaccatgtccagccttctcggctttttttttttttttttttcagatgaagtctcactctgtcacccaggctggagtgcagtggcacaagctcggctcgctgcaacctctgcctctcgggttcaagcaattctcctgcctcagccttctgagtagcagggactacaggtgcgtgccaccacacccagctaattttttgtatttttagtagagaaggggtttcaccgtgttacccaggatggtctcgatttcttgacctcatgatctgcccgcctcggcctcccaaagtgctgctattacaggcgtgagccagcgtgcccggcctcagctttttttttttttgagacagcgtcttgctctgtcatccaggctggagttcagtggcgcgatcttggctcactgcaacctctgtctcccaggttcaagtgattctcctgcctcagcctccggagtagctggggttacaggcgcccaccatgacacccggctactttttgtatttttggtagagatggggtttcaccatgttggccaggctggtcttgaactcctgacctcgtgatccacccaccttggcctcccaaagtgctgggattacaggcgtaagccactgcgcccagccccttctcagctttaaaaaaaatgtttttttctttttctttctgttgttttgagctaggatctcgttctgtcgcccaggctggagtgcagtggtgcgatcatgactcactgcagcctcaaactcctggcttcaagcaatactctcatctctgcctcctgagtagctgggaccacaggcatatgccaccatgtccagttaatttaatttaatttaatttttgagacagagtcttgctctgtcacccaggctgtagtgcagtggcgtgatctcggctcactgcaacctccgcctcccaggttcaagcgattcttctgcctcatcctccctagtagctgggactacagtacccaccaccacgtctggctaaattttgtatttttagtagagacgggggtttcaccacattggccaggctggtcatcctgacctcaagtaatccacccaccttggcctcccaaagtgctgagattacaggcgtgagccaccacgtcgagcctacccctagatctaagctgccgccctgtctccacccagatgatatcagcagcccccacactggcctcctttcggtctcccatcccctcagtggccggagggaacctgttcaaatgtgagttgggtcaggttcctcctctgctctgaacctgcgtggcgtgccctcactcagaaggtgagtcagctcaatgccccgggtgtcctgtgttcacccctctgtcagggcctttgccagtccttctgcctggagcaccttccccccagggatccatgagacactgccttacctcctcagtggcggcctccccatccatctaaagtgtaagctgctgggtcctcccctgcttggacgggtctctggcacattgaaggagtgcactaaatatctgccaaatgggccgggtgtggtggctcatgcctgtaataccagcattttgggagaccaaggtgggaggactgcttgagcccaggagtttgagaccagcctgggcaacctgatgaaaccccatctctataaaaaatataaaaaattaggttgggcatggtggctcacgcctgtaatccagcactttgagaggtcgaggcaggtggatcacttgaggtcaggagtttgagaccagaggtcaggagttcgagaccagcctggccaacatggtgaaaccccatctctacccaaaatataaaaaattagccgggtgtgctggtgggtacctataatcccagctacttgggaggctgaggcaggagaatcgcttgaacccgggaggcggaggtagcaatgagccaagatcacaccactgcacttcagcctgggtgacagagggaaattgtcacaccaaaaaaaaaaaaattagccgagtatggtggtgtgtgcctgtagtcccagctactggggaggctgaggtggaaggatcacttgagcctgggaggtcaaggctgcagtgacttgcgatcatgtcaccgcactgctgcctgggcaacagagcaagactctgtctcaaaaaaaaaaaaaaaaaaacaccaaaaccccaaaccccaaaaaaccctgtggaacgaatgaatggaagagtgaatgaagatccgggtggtgacagcagatcctctagtttggggtagggagggagatccccggttccaccctgtcacgcctgtctgtgcccgcccctgtcccttccttacccttggcaatcttgatgtccagggctgtgcggatcagagccatgagggtggaattgaagtggacggtgttgtcatctgcgacgggcaggtccatccgcagaagccgctacagaaaacccaaggcaagcgcagtcattcccaggcatccctcctgggtctcccgtgagccgcgcccgcccctacccagggagtcccaggaagaactctgaaagctgtggcggctgaggtgtctcttacttaggttacctgtcccagtactcagtttctcttggtggcccgcagggagggcacaaaaggctctcttgtacttctggtcccctgccctctccttttttcccccacctgcttgacctgagagctggcatttccagggtttgcctcaacccttgccccacccccgccctgccccagagttcttctggatggccccgtttcagtctgaccccaaagaaaaagagcacaagctggatttgagcagtgcatgcaacagccaaggctgagggggccaggaccacagccgctggtggggggtgccactggctccccacacccaatccctggcttggcccagaccaggacagagcagatgggcacagaccacatcattcctctgagaagcagcaggcaggcagccccccactgacggggcaggcccctcgcaggcatgcagcgaggctgtgacacagaacagcacagacaggggcgcatgcagacggaatctcgagactcattcatagctccgtgggaagtgtatctcaggggcatgtccagatcttggctctctgtgcaatggcagggggaaggggtgaggggcactcccttccagcccagggaagaaaagattccccatgtcccaggcaggggctctgtccaccatgcttggtggcatgggagaggatgctgggctggtgtgcaccagcccaggctgaagtggcacagagaaggggggtgagggcaacttgggtggggattcagacacaagtgggcaggaaacacagagttgaagatggggaggggtatggtaaatccagagcaggacactggaggggacactgggggtagggtggggaaggaggtgggaaatagagaaacacacatagactgggccactgtgcacagttgtgcaggttgtacaccgcacaaagggctcccatcttggaaatgatagatttatgtacttatttattaattaaaatattttttctttttgtagagatggggtctcgctatgttgcccaggctagtctcgaactgggctcaagtgatcctcccgtctcagcctcccaaagcactaggattacaggcatgagccaccacgcccagcccccgatttgtatattaaatataacagcttcccaggtgatagaaaaaaagtgtcttgttctcaccacattggtagattgcaacaattttccaacaggcatgttctgtggaaagggtgcctttttcaaatttgcacaaagttgtcttatggacccatggtggtcctgcacaaagaccaggagaggaagggctcgccctccctctcttgcacatgcgcacacattcatctaagcagagactgagagaagcgacttgaggaaaaccgggggggggggggggggcggcagggaggggcacagagcgacaggtgccaggagaggctcattgtctgagatgctggtgggacaaccttgtccccggctttgattgagaaggaggggagacatataggttaggtgaggaggggtgcacagaggaaggaaaggaatgaggtggcaacacggggcaggtacaaatagcattgatggatagggacgcagggaagatcaaggtggatgggagaataggatgatggggtaatactttttgggtggggagaatctttaaaggtcatccctgaacttcttgtggatgaatggagggaacagagcatctgtccttgggcaccaagggagattccaggacagggatctggaggggtggcccgggccagccgcttggcggcaggacgctcgctctctcagccagcatgcaccaccccccgtcggccatggtgcctgcccgccccaggccccgccaaggcagcgtgcatggcctgcatcagtgtgccaccgtccaggggtccagctgcggccgcctgcccactctggaacaatggagaggcatgttggggtgtcttggggggattagggacgggggctggggacgaaactccaggggaaggaagggaggggaagagaggttcttggtgctccttggaaggtctcgaatccccaaggccctaggtcagagatcagcttcaggtgtgcgtggcaggggcggggacccgggacctcgcctgctttcgggggctaaagcccctctctgcaaggcgcctgccccagcctgggcatgggggccgctctgggtgggcagaagtgggaagcatgggttttgactccctgaagaagcgtgtttgtttccaatttggtacctgggagaccaggtgcaaggggacctgggcgctcccctccccctccccccggcatgtcggccataatggagtctcaaaacacgaagacactcatcagaaaggacggacacagtgtgctgcttagaatcaagggatggtcatgatcagttgactcgagaaaagaaaaaaaagaatcaaaaacaaaaaagaagagaaacgttggaaaaagagagtcggccgggtgtttctggtcagcactaaaaaaaaagaagaagaagaagaaaaaaaaacccagtgcctggacgtcggtggtcggcaagggtagtctaccttgtaagccactctggccggacacttcttccccagacccaggggcggagacatgtgtctcagcatctgatacatgtccaggtaaggcatgcggcccctggcagcaccgaaaatgaaaaaaacaaaaacaaaaacaaaaaaacaaaacgggaatgggaacagagaaccaaaggaagagaggtggggagaaacagaagaaagaaaaaagaaatccacacgagccgaaaaaatagagagagaaagatgcagagaatgataaaatagatatttcaaatcaatggaaaagaggaggaaaaaaaatggaagaaaaggtcagtaaaaaaagattacttcactgctcgggagcagggagagagagagaaaagagaaaagtcagattcagcgtgggctctgagctacagttctggagggatgcggaggggagggagaattctcactttggaagacgtagagccatgcttttgttcattgcctttttttttttttttttttttttttaaagagacagggtctctctctgtcgcctgggttggagtgcagtggtgtgatcatagctcactgcagcctccacctcctgggctcaagcaatccttctgcctcagcctcccaagtagctgggactacaggcatgcgccacaatgcctggctaattttttatagagaagggggttcttgctatgttgcccaggctggtctcaaactcctgggctcaagcgatcctcctgctttggcctcccaaagtgctgggattacaggcatgagccactgcgcccggccatcactgttatttctacagttgggtcacgttctctggtttggctgaggctggtctctgagggggcctaggtggggagcaggggccagtgccagggaggggaggagggctaggggctttgggaggtgaggggtggagggggagagagtggaggtgatggttgggggagaaatgcaaagttacaatcccccaggggatgtatctgatttggggtgccgtggagaccccaggatgggcagcttcagctaagagcaagcaaagatggctgaaggctgaagggaaggaggaaatatgttccatgctttatcgagtctacatgactgcattctgttggctaagagagttttctagtttaatgcaagaaagagagatggctctgtttttttagagagagagagagatatatatatatatatatatgaaatatatatattgaagaaccccaagccacactcattccatggatgctagcaggttttagtggaagtcaaaccttgcaagcaaccctatgaggacatttcttgcctaagccgagagggggagatattactcgtaataaactgtacatatccttataatgaatccgaccgctgaaaggagaagaaagggggttagtgcaggcaatgggttcacacgggctccctgggcacacagcgaggtcatgatgcccgaggctggggtgtccctggcttgaaggagtgggagagactggggacaagtgaaggtccccagtacattcccagacactggggagacccaggggtgtaggatgtcagtcgagttcgggactgcagggcacctcccctggggctctctctgcatctgcctcctccacagtctacatgggctacaggggtgggggggggcttgtggaatagaggccttggggacagcatccaattgctgtgacctaaaatcaaaagaggaagagttaggaaccagccaaagcccagccccagacccacggctctccccagcctctcggtctcatggagtacttgtttgaggctatgggaatagccaagaccacctcctgcccaccttcctcgtgacggcctcctctctggtgctgaggccagaggaagatggggcttaggctgctgagggccccccagtaatgcttcttcaggccccaagaccagcctgaactaaatcctcagttagtggctggtgggttccaggtattcagataaagcctctgagtgtccttcaaggcttggtgttgggtgggcactcaatacacgtgcacaaggtggaacccaccctctgaaaccattgcccgtcagtggagagggacccctctggtgtctacccagatgggagcgcccactccctttgtggccacaaagatgcatgggcccctgaggctctgcgtcctcccctggcctgtatgtcctctcactcccaggttcacgggtcccagtgggagctgagttctgctactctgatgttgctgccaatcctgtctgccaagggtaggccagccctcctccccacactctcaagagaactgaggctgggatgctgttggttttctccctggagcctggctaatgcatcctcaccatctggagacttcacagtgagagacaggagagactcgtaggaggagagggctcttcaggacatctcatggttgacgccctccctcatttcccagaaagtccagggtttgggcagggttggcaccctacgtgtttaatctggggtatgcaagggtgatgattcttatatcttctctcctgactgaacctgtgagacccctgctaggaccccaggagttcagtgctccagagtctggggcctgacctagcccgtgttccagttccagggagaggtgagtattgtggctggaggattcggggtgacttcttaccaagctgcggggtcatactcggcccagacacgcacgtactcatccaggtggtgggggcccaggatggaggagtctcgggtgaggtactcaaagttgtccatgatgacggcgacaaagagattcagcatctgtggggaccccggggaccaagagagaatgggggcagagaccgagggaatgaatgagtgagtgagaaggatacagacagacagacggacagacagacccaaagacatgtacacagaggcccagatggagagagggatagagagaagatggggaaaggaaatgagacagagacagaaagagactggggaatggagaggtgatgctcactcacacaaggaggtccagtgagagagagatcaagtggagagatggggaagaggaagagagaaacagagagagatggagagagagagatacaaagagacaaagactggccgggcacggtggatcacgcctgtaatcccagcactttgggaggccgaggtggacagatcacttgaggtcaggagtttgagaccagcctggtcaacatggtgaaacactgtctctactaaaaatacaaaaattagctgggtgtggtggcatgtgcacctgtaatcccagctacttgggaggttgaagctgaagaatcggttgaacctgggaggtggaggctgcagtgagctgaggtctcgccactgcactttagcctgggcaacagagtgagactccatttcaaagaaaaaaaaaaaagagagagagagacaaagaccaagaatgatggaaagaaacagagtcagtgagagggaggggaggcttctgaaacagggaccaacaccaagagaaccactgtgaccccaaatcctcccacatctgcccccaacaaggccaaagtgaggtatttcttccctcgcaatgttttttttttttttgtttgtttttgtttgtttttgagacaggatctcattctgtcgccctggctggggtgcagtggtgtgatcatggctcactgcagcctcgacctccaaggctcaagtgatcctcccacctcagcctcctgagtagctgggactgcaggtgcacagcaccacgtgtgcagctaattcaatttttttttttttttttaaagagatgggtttcacaccatgctgtccaggctggtcttgtattcctgggctcaagtgaccctcccacctcagcctcccgaagtgttgggattacaggcatcggccactacgcccagctgaaatatttcattgagtctcaaatgggggaattctggcccccactcccaaccccacccccaccccctgggggcacctggcaatgtccggagacatttttggttgtcacaacaggaggaacgggtggcgtgtgctgccagcatctggtggggggaggacagggatgctgccatacactgcagtgcacatgatggccccaccccaaagaatcagccacccccaaatgtcaacagtgctgagtttgagacgctcagggtcacctgatcccaggctggttcagagaagccttggagggaacaagccttcgacacagccacattccacagaaacccactcccctgaaaggaagccaggcttagggagcccagacggccctcacagtgtccacagactcaccagaaacgagcagaggaagatgaaggaaacaaagtaaaaataagcaaattcattgccacactctcgagtcaggatgccagagttcttatcacacggtttcccgctgaggcaggaaagcatgatgttgtgccaagcttccccggtggcactcctgaggacagggagaaatcagagactcggacacccagccctgactgggtaccaacgcctccccaggaggtggagcacacacgttgagcacttgggctctggagctggccaggcaagccccaggtggaccacctccttttactgggagctgagagaagggaattcacattcttggctgtgcactgaagtccacagagagctttgaaaaaataccaatgcccgtgccccaccccagcagacttggattcagttggtctagggtgggatttgaggacactgatatgtttttttcttttcttttccttctctctctctttcttttcctttcttttctctctctctctcttttttttttttgacagggtcttgctctgttacccaggttggagtgtagtggcacaatcactgctcactgcagcctcaacttcccaggctcaggtgatcctcccgcctcggcctcctgagtagctggggactacaggcacacgccaccactcctggctaatttttaaactatttttttttgtagagatggggtttcactgcattgctcaggctggtcactgttatgctttaaaagctcccctcttggctgggcgcggtggctcacacctgtaatcccagcactttgggaggctgaggtgggtggatcacgaggtcaggagattgagaccatcctggctaacatggtgaaaccctatctctactaaaaataccaaaaatttgctcggtgtggtggcgctcacctgtagtctcagctacttgggaggctgaggcaggaaaatcgcttgaacccaggaggcggaggttgcagtgagctgagatcgcgccactgcactccagcctgggtgacaaagagggagattctgtctcaaaaaaaagcaaaaaaaaaaaaaagctcccttcaggccgggtgcagtggctcatgcctgtaatcccagcactttgggtggctgaggcgggtggatcacctgaggtcaggagtttgagaacggcctgaccaacatggcaaaaccccgtctctactaaaaatacaaaaattagctgggcgtggtgacgggcacctataatctcagctactcgggaggctgaggcaggagaactgcttgaacctgggaggcagaagttgcgccgagccgagatcgcaccactgcactccagcctgggcaacaagaccgaaactctgtctcagattaaaaaaaaaaaaaagctcccctccatgaaggtgacagtcatctcatactatattctccctagatcactctgttctaggtatgctgggctcctcacagtcctcaaacatgccagccatactcctgcctcagggcctttacacaggcagtcccctcggcttggcctgcccttccccatatacccactgactccctcccttgccaatttctctcaaatgtcacactttcagagaggcataacctgccggccctctattctttttttgttgttagattaaaaacattattattttttactgtggcaaaatacacacagcatgaagtttatcaatttaaccattttgaagtgtacaattcagtagcattaagtaagctcacattattatgcaactatcaccactatctacctctgtaactttttttaaaaattaaaaaaatatatttttctttttagagacagagtctcgctctgttgccgaggctggagtgcagtggcacaatcatagcttactgtagcctggaactcctgggctcgagcaatcctcctgcctcagcctcccaagtagctgggactacaggtgtgtggcactatgcccagttaattaaaaacaatttttttgtagagacggggtctcactatgttgcccaggctggtctcaaactcctgggctaaagcgatcctcccacctcggcctcccaaaatgctaggattacaggcacgagtcactgcacctggccctattcccctttattcttgaattttatctttttccagcatcctctataatttgtttcctgattattcgtcttccccatggggatgttagcttccaaagtgcttaaaatgtctcttttctctatttcctggtgcatcctcgtttttcagccctgcctggcatgctgtaggtgctcaatacacctccacaagaggagcttgcagtgagccgagatggcgccactgcactccagcctgggcaacagagagagactccatctaaaaaaaaaaaaaaaaaagggctgggcacggtggctcacgcctgtaatcccagcactttgggaggccgaggcgggcggatcacgaggtcaggagatcgagaccatcctggctaacatggtgaaaccccgactctactaaaaatacaaaaaaattatctgggcgtggtggcgggcgcctgtagtcccagctactcgggaggctgaggcaggagaatggcgtgaacccgggaggcggagcttgcagtgagccgagatcgcgccactgtactccagcctggggaacagagcgagactccatctccaaaaaaaaaaaaaaaaaaaaaaaaagcccccccaaaaaacctacactgaacgagtgaaggaacttttgtgtgcagccaagatgatgaaccaaagaatcaagcctcacggtctgtaagcctgttttcttatttgtcggatagggctgccaagaatcccttcctcacagggtggtcaggaagattcagagataatgcctggaaaatgaccttgatgactatgtcccagggccctctgcttctgccctgctaggattcctgggccccccacgacacccatttccagcctcacgggaaaagaaggataagagcacatctggccacccccacaccagaaaaggaggaggagggcacgccccctatcggaagagaaggccggcacgtcccctaccggaagagaagggcacgccccctaccggaaaagaagggtgagggcgcgcccctgccagaagagaaggaggagggcacgtcttgcattggaagaggagggtacatcctctatgggaacagaaggatgaaggcaggcaccccaccccacggaaacagaattatcagagcaggtccccttctcaccggaagagaagcatgagggcctggaagaaggtccggaagttattgtgctcagtgatttggaactcatcttcatcactgtcctcgtcctccacgtcgatgccaatgttaccaaacacctgtggaattggagggtgacgaccaggggctgccattcctccagtggcttctgggaaacccagctcaacctccatggctgcttctgtgaaccaggctcctctgacccacccctttctaagggtggctgccctccttgggaggctctgggaaccttagggacacgacactcacctgcatcccaatgatggcatagatgaagaagagcatggcgatcagcagacagacataaggcagggcctggtgggaaaaaaggcaatgaagaagagtgctgggggtccctcagccgcactgtcttcctcccttgtcccagtgctctgccccactgggttgggtggccatatgccacgtgccagagtccttccagggctggtgggcatctctgggggctctaggatgaggcccttacagctctgaagacacaccagggacaggaagtttgacaacagccttggagataacagattctctgcacgactacatcacagaggcacttccaatctgacttctacattcagccagagcatgagggtcacctgtcttctcagccctgggccagcagcagggacgaggactcaccttgaaggactgcacaaaggtccagagaagaatgcggatggtgtaaccctgacggagaagtttgatgagccgggcagctcggaagaggcggagaaagctcaggttgatgaagttattctggggagatggaggaagaggggtgaccatccacccaccccaaaaggctcagagctgtcaccactcacagaggcccctacatgaagccaaccaacaggaaaaaagcaagccagaccccaaataaggagggagagagaaagcactattaatgcaatgatgcagaggaaaaactcgaaaaaggaataatgttgggagagagagggtgggagggaggaaaaggcatcaactcaaaagcataagccctccctgccagccccacccacaatggggaaaagaaaagaaaaagaaaggaggaaaaaggaacggggatggggaagaaataacaaaagaacaagaaaaagaaaatatatccgaatcatccaatcaggaaaaaaatcgagatggtttttgtttctcccaacaaccaaatgcactgagacgaaaggacacaagccggtcaagttgcggaatctatcatacgtgtacgatgcacaaacaccagggcgggggtgggggtggaggtcgccagcacagtcaggcctggtggacatgtgcgggttccgagggcatgttacgctccgggccagaaatgcatctgtcacgggactcaccgggcaccctgccctgccctgccctgccgagctgcccacccgctcctgcccgccctgacctcaccccacggccaagaggagcagcggctcgagccaattgggagaagcggaagagcatcttttcttacccccttggcgagcgggaatggggaggacgggagggagctgggactgttcggctgcagggtgagtcctcgctgcccgctgagtcggagaagatgcatttggggcccttttcccccctctcagggatggcttctcagcttctggggctgggtggagtagcacgggaccaggcctgcaggaagcaggaagcactcagctcccatgggtgggtgagctcagaaatcagcccgggcccaccaaggggcgggtgctgggggccgggaggtggggccatccctgcccccaggacctccctgggtggccactgcctctgctcaaaaaccccctgtctagtcactgcctctgcctcctcccacccaagctagaagaaccagggggccagagagttggagagtcagggaggagaccagctagagttaagtggccattgtggggcttcaagggaccttggtggggggggtgggactctcgaagtcacgagtgggccaaatctagctaataaaactgttttgttgggcccgagcagtgttttttcatttgtccttgtttttaattaaaaattattgccattgtttaaaaatcaagagattttgcccaccaatctggctttctggcaaccccaggcctgctgcgattgctccctggaagcaggccacatgatctccagttttccagggtcctcacgttttagaaatggcacttgctttcctggttgactggtgtctgcctggcccccagaggcatttgagtttgagaccccagcctcaggcagacatggaaaccctccttcgctggccagtacccagcagggtgaaggcaggaggagtagagggtctctccacactaagggaaggggcttaatcagacttgttctatgggatttgtaggatttgctacaggccacgtagcaagatttaacttggtctaaccttcaccccccaaatggcacagggtgaccatacagtcacagcctccctcctgtttcaaaagtgtcctagtttgggtgacatgggcatcctacttggtggcttccagagggctttctggctgccagatctgtgtcttgtgctggctttggcctgggagctgagaggcaaggactggagttcaaggaatttctgaggcctctgggtttgatggcaatgtctaggatgctctctgggacacatcagtgcgtccttaggcctctaggatggggaagggggctgggggatcctaccctgaccacactgggctcaagtgctgtgagaatgtctccagtgcctcgaacaagccccaaacccagcttggctaacagagtcactctctgtgccctgctgccctgacccccatccctgcctggccacccagctccacctggggatggggccgatggctcaggtatccccagccccctcccgttcaaccccagagtacaagccatccctttcatggggcggatcataacatgtggactcggccaggcatgcgaaggcaggcggaccctggaagcagcctcaggaggggggtttggaggagagcaggggaagcttgcaaccatgcaaaaaagccagggatctggcagggagatgcgtgcagaaaacatgcttcccttcttggagccaagtgggggaggagacacatgaggcaggtaggggtggagacgggaagggtttggggcagtgggggaagggtactagtctgccctcatccaccctccatctcttcctgcatcagtaccaattctttccactgcccccagaacttctgacaagttccctcttcctgccttccacatttcaatccatggcttgggaggtgcagcttcctctcttcaacacctcccctgaacttcctggctagaatgtgatgggggtgggacacagcccctggaagacatgaggacagcgtccttgtggtcttttcttttccagtgctgtgctcagatgttcctcaagtgctcagaaggatatggagaccacccacctaagggctccagaaaagtcctactacttgtagacctcagctccaagctgcagcccccacaacacctgcctatctgacttatttcgggatgtcctaaaggcacctcaaacttgctatgcccacacctattctcttcccccaacctggtcctttccttgcactcgctcacctctatcacccagtattttttttttaagagagtctcactctgttgcccaggctggagtgcaatggcacgacctcggctcactgcaacctccacctcccaggtttaagtgattctcctgtctcggcctcctgaggatctgggattacaggcacctgccaccacgcctggctaatttttgtattttttaggagagatggggtttcaccatgttggtcaggctggtctcgaactcctgacctcaggtgatcttcctgcctcagcctcccaaagtgctgggattagaggcttgagtcaccgtgctcagcctatctcccagttttaagccagacccgactgctcccaggcacctcatctcagttcagacctgatctttccctgggtcctgcagaggacaaccctcccactgttctctctcctccactgtcatctcttgctgcgattcctggtgcccacctccagcccagcctcctgtcaagctgttccctgccctgcaaccagagcgagcttgtctagtcacatgaccagtcgcgcctcccctgcttcctatcctcccaggcccttcctggtgcttaggagaaagcccatattccacaatatagccccgccctccccagccccgggtcctgtccccttctgccttcttcggctgtctccaggccagcctttctcggctgtctttgcatcagccacattccctcgcttgcagatcctgacccctcacaggttccgtcccaccacagggcctttgcatgtgctgtcctgggcctggaatgctctgtgcatctctctctgccttgttaatgctgctcatccttcagctcgcagtgcaggtataattttaagtggagtcaaggggttatttgaccgatgcctgcctcccccacctgactgtatgtggtaagaggggacagtaatggtgtctgcttctgcccataattccatctgtggcaccaaataggggctcattaaatgtttggtgggtgaatgcatgtgtattgccagcagggaagggatgattccagggcaaagatgccattggggcgtccctctaagggcctcattggtgggtaggagaggggcagaggcagttgagatttaacagaacaaggggtgtgcaaggggctgagaagtgggggagggagagagatgtgtgcagtatgtactggagtgggggtacagggtgggtagatgtagcagagagggccagtgtgtgtgtgtgtgcatgcgtgcatgcatgcatgactgtatgtgagagacacagagacaggaacagtgaatgaggattagaggccaggtgtagtggctcacacctgtaatcccaacactttgggaggctgaggcgggtgcatcacttgaggtcaggagttcgagaccagcctggccaacatggtgaaaccctgtctctactaaaaatacaagaagtggcctggcgtggtggtacatgcttgtaatcccaggtactcaggaggctgaggcatcataattgcttgaaacggggaggcagaggttgcagttagctgacattgtgccactgcacgccagcctgggtgacagagcgagactctgtctaaaaaaaaaaaaaaaaaagagcgagagagagagagaattggagaatgagtgagaaaaagagaagaggtcatgactatgtgcagtgtctgtacatgcagtgactgtgtgttcagtgtgtgggtgcatagactgtgtgtgcagtgactgtgtgtgtatagcgactgtgtgttcaatgtgtgaatgcagactgtgtgtgcatgcatagtggctctgtgtgcagtgactgtgtgtgcagtgtgtgtgcatagtgactgtgtgcagtgactgtgtttgcatagtgacagtgtgtgcagtgtatgtgtgcacagtgactgtgcagtgtgtgtccatagtgactacatgcagtgccagtgtgtgtacatagtgactgtgcacagtgtgtgtgcatagtggtgtgtgcagtgtgtgcatagtgactgtgtgtccagtttctgcgtgcagtgactgtgtgtgcgcagtgattgtgtgtgtgcagtgtgtgtgcagtgtctgcgcagtgactgtgtgtgtggatagtgactgtgtgtgcagtgtctgtgtgcagtgactgtgtgtgcatagtgactgtgtgcagtgactgcagtgactgcgtgcagcgtctgtgtgcagtgactgtgtgcacagtgtgtgcgcagtgactgagtgtgtgcacagtgactgtgtgtgcagtgtctgtgtgcagtgactgtgtgactgcgtgtgcacgtacagttcaaggctccaggagagggcctcagtgggccagccccacatgaagctaccagatccaagtctggcacttctgagttcctctgcctgagagtctttgccggcacactgcctggccttcaggtctcctttatcagacttggagagtcaagtctctgctggtcaaggccaaagatcttgtgggcttgagatggaggattggggacagcaggatggagagagctggaggggcgaggagacagttggcagctttcctggggcctggggtccatggagctgaatgggggacaggagtggtgagaggtggctgggagtggatttgcctctattgtctctgagtgtaggggatgtgtgtgcgggatggggcaagagagaggtgctgcgctgggaaaacccatccctttctctgcaaaagacgcaaaccaccccaaacagaaaacccccattcagaacccgataaaaacagagagacagagtctacaggaagtgggaggcacaggggctgggggcgggaggacagacagacagaggagagcggagggttgaggagagcgtcaggcatcccacgttggagaggcagggtgtggcatgcaatgccgacgcgaggagatgcgttcacagttaatgtaaggcatttagacttcagaaagaagtaagaccaaccggattctagatgcagatgttgaagatgagggggagcgggcgggcgggggcagttggggaggcgtgttcagcattttttaggttgatttgtaaccagtgccaaaaaaccaatgggtttcggttcccgggcggggagtgggggtggtggtggcggtgggttgggagataagtcattggtgtatgaacacacagaccatgtcatggatgaacaaatgaatttcatagtgcattttgattggatgagtttttcagacggcgttgcgccaatatacagttttaagagcaggcatgaaaagagacaagacaagaaacacagtcattatccattgcacacagggcaaacccacatcaccccagccacttgggggcagcagctgagacagcactggttagtactgccgcatgccctctgccccctaaaccccagggacctgcccgcccaagcatctggcatttcctgtctcagcctggccaagccctggcctcagaactagtgggcttacctgggaggcagaaaggggcaactgagacctccttgcctgccaggacatgcctctccctactccaggttgggagttaattgtcccagaaggacccaaacacccaccccctatctttccctcaaattgactgtaactcagggctggctaacaaaactacacacccattcacaataacaataacaacagcagtaatagttaacaaccaccattttcaaactcctggtttcctggcaggttctgtgccaagcacttcacgtttctttctttctttttcttccttttctttttgagacagagtttcactctgtcgcccaggctggagggcagtggcacaatcttggcttactacaacctctcgcctcctgagaatcaagtgattctcttgcctcagcctcctgagtagctgggattacaggcacctgccaccgtgcccggctaatttttgtatttttagtagggacagagtttcaccatgttggccaggctggtctcgaactcctgacctcaagtgatccacctgccttggtctcccaaagtgctgagattacaggcgtgagccaccatgcccggcctgttgatgcttttacttgtaaaaagttcccgtctctctccttagaatgtcagctctatgggagcagacactctgtattcttggtctgttttgtttggcacccctccttctcgttctgtctccagcacttataatcacaccaggcacacagtaggtgctcaatgaatgtcttttgagtgcatgcatcactgtgagtcttgcaagtgtctgaggttggttgcaatggttagccccactctacatgagaagagatagcgcaagttgtccaagatcaaacagctggtagggagggctgggggctgtttggctactgcaagggtcctgatgtcccatgaacaccccatgccccatcttcctgccagccaggagaacaggctgttggagtctgtccctacagctctcttactggtgattgaaggtttcagctaacttcctccaccccacctgcccttctggggagctggaccatccttctaacctcttgacccaaagggacattggttcaaggctgtcttgtatgtagccggatggcaagatattttgattgccagctggagctccagccctctctagaaactcaggacaggggagaatgaccaggtgggggcaccccagtggagagagcccccatgtgggcaagaaccctctagaggaaggtttcagggatagggtgaggggaaggggaaaattctggctcactggagctgaaggcaaataagtgtgtatcacttgggtgcgggtgccgtaggacatatcaaagaatggccccctcttttgtgtagttccccagcccctcctggccttctaggacggaagagcaggcaaacagatccttttctgtagggggatctgactgggacaccccaggagctgtcagtgtactctcaggagtcacccaggcctggctttgtgaccttgggagtgtctctcacttccccaggcattgaagatcagttttctttctttctttttttttttgagatggagttttcgctcttgtcacccaggctggagtgcaatggtatgaccgtcgctcactgcaacctccgccttccgggttcaagcaattttcctgcctcagcctcccgagtagctgggattacaggcatgcaccaccacacctggctaatttttttgtattgtcagtagagatggggtttcaccatgttggccaggctggtcttgaactcctggcctcaggtgatccgccggcttcggcctcccaaagtgctgggattacaggcatgagccaccgtgcccagctgaggtcagttttcccatctgtgaaatgaggcaacaccctcttcctcaggcccgaccacacccagatctattctcctgacttccctgcctgctctgagcatcatattcagcttgcttccggtttactttgggccatgggaggctctggcaggagataagggatgaggggagagaaaggttggggtgtttctcccctattgctctctgcctgcttgggccctggtctctgtctctccacattgacaggacagctcccacttggtggcttctcctggcctccggctcaggttccctccccacttcagcacctgggcaggtgacagctccccacggtgggtggtcgctggacaccttgccacccttgtgggtacccttcccttcccctccaccagtgaggtctgcatttgggtgccttcagttgaaccctccgagggaattctcttacgagctgagaccaagacctctaccctgagccaatccacgtaaaccacttggcacagttccctggcacacagcaaggctgcgattctcgtgagctattgttatttttattgttagtaagatgacattggtatcacccttgacccttggctttgacacccttttttgaccattgcttccccctgcaaggatcttctaccctccccccaatctcctgagggaccccaagcctgggctcattggcagatggccaaggagagggtctaggacaggacctctggggccctgagtcttccagaaaaggagaagggcaatgtggcctgtggggccaccacagagaggtccagagactcccatgttgagagtctcccaggcccggggctagaggagggaagacaccctggggacccctctatggccctgggagtggtgtccccacactggcctgagggctgtggctctctcctgcccactaactaggagagggttggttcaaacagaattgacttgaaacccattctttctgggctcctgacatagggtggtgtttgggagccggctcagctttcagagcttttgagtgtctcagttccctcagtgtactcatctgcattattaattcctaggccaggatgcaggaaagcccacccctcagtgctggccctacagccaagctttggttacccccatctccccacaatgccctcctgaggggctgcccttgtccccggggccccagttctccctctctggtcatggccaagtgctggctcaagcagctatggcttccgggacacactgcctctgggaccgctcccccgccccctgccgcctgcctcgtccagcccagagtcacccagagagaagctggagggagacttaccccaaactcagtcacgaggatatcggtgatgctgcccagaacagtcacaaagtcgaagatgttccaggcatcgcggaaataattctagaatggggacccacaagacagagatgccaacagagggcttggttcccggccccctaggctggccgggtgcatgttagaggcacagttgcccatcagcggagtgcccgggacagttatggttgttcgaagggctgcggtaaaggctgttcgacatcatctgtgctgagtctccctccctgggaactcctgggggccttcccatgattggcctggccccagagggggcctccagaccctgcttcagctccacagggctggggctgctcttcagagctgtggcctgtctctccagcatttttgagggctcccgagaccccaggggctttataaatgacatcactgagctcctcatgaagatcctggagggaagggttatcacccattttctttttctttctttctcttttttttttttttttttgagatggagtctcgctcagtcatccaggctggagtgcagtggcacgatctcggctcactgtaacctctgcctcctgggttcaagcgattctcctgcctcagcctcccaagtaggtaggaccacaggtgcatgccaccacacccagctaatttttgtatttttagtagagacggggtttcaccatgttggtcaggctggtctcgaacttctgacctcaagtgatctgctcactttggccttccaaagtgttgggattataggcgtgagccaccactcccaggtatacccattttctaggaggtaaccaagccactcatctgcctgaggctagcagcacagagatgtaaagccaggatttgaacccaggcctcagagagcccacagtctgtgttcaggtccccactaggttggcagcatactcgcaaagaaaggagactctgggttcaaatcccagctctgctaccacagctgtgtggctatgggcaagtggcttaacctctctgggcctccatttcctgatctggaggcggacagtaacagggtgcagaacaggcactggacggggctttggggcctttcaggcacacgcacttcctggtccccttgtgtttagatggggccatgtgtgtctaggtgcagtgatgtgctgtgtgtggaagcagtgtggtcactttctggtcagtgttggactctctagcctctcaaccctgggcttggcgaccagtaacattttgaatggcagctactctgtgagcctgggtccctgggtaactatgaggcaaacagcttccctgctgaatgtaaaaaacccttcccatcaatttaagtcactgagatgtgggggctgtttgttactgcagcttcacttgatctatcctgactgctgcattcctgggctgggtgctggctcaaggggaaacacaagcataacctctctgtttgttttttttttttgagacagagtctcactctgtcgcccaggctggagtgcagtggcacgttctcggctcactacaagctctgcctcccgggttcacaccattctcctgcttcagtctcctgagtagctgggactacaggcgcccaccaccacgcctggctaattttttgtattttttagtagagacggggtttcaccatgttagccaggatgatcttgatctcctgacgttgtgatccatccgcctcggcctcccaaagtgctgggattacaggcgtgagccaccacgcctggcctctcttttgttaaaatatggaaatactccacattgtttggagaacagtcacagcctcaagtcccacaaggtctcctgctatctctgactcccctcaaccgggtactgacatggtgatgggtggcaccccagtttggatccaagagtctgggtcaaagagatggccctcccctctggggtcagtgggacccaaaacacaaaacacagggccttctcagcatcttcgcagaagcagaggccaggtcaggggttggggcggtcagtgtgaccctgaagtagcccctctaccttacagagaaggagcctgaccttagagctgtgcttccctcctaggcgaagtgcctggggcctctgcgcccttctctggaaggcagtggtaacacagcaatcagacaatgaatgtgcgtcgctgagcatggaatatacagtaggtgcccaacagatgggatgttgttgtttcacaactgcctaaaaaaggaattcagggggccgggcgcggtggctcacgcctgcaatcccagcactttgggaggccgatgtgggcggatcacgaggtcaggagatcaagaccatcctggataacatggtgaatccccatctctactaaaaatacacgcacacaaaaatcaggcaggcgtggtggtgcgcgcctgtagtcccagctactccggaggctgaggcaggagaatggcgtgaacctgggaggcagagcttgcagtgagcagagattgcaccactgcactccagcctgggccacagagcgagactccgtcaaaaataaataaataaaaataaataaataaataaataaataaataaaaaggaattcaggtcccactggcacttttggcattttggcaggtgttgctggggccctgcccatagctcaactacacacctgaggtacactactttgcccagggtctctctgtggctgcacaagtgttagggaattaatagctcccctgggagtggcctgtgattatgtctgatgggcactggaggataaatactccaattccctccctgtgaggtgggatgactctgtggtatgtgctctctgttgcctcctggaggtatccactgaaactgagccccatttgttcacagcaggaactggcttaataatacactctttcctggttgcctttctgtccctgtgtcacttcctctctcccttactgccctgcatcccagataaattccttgcactcaatccttgtctcaggctctgcttctgggggagtccaaacaaagacaactttataggcgtttggtcacagacctcaacccctaggctagagagctcccctctatctcccaaatgttatacagggaacttgtggcttcatttaaaactgaaaggggagaccaggcgtggtggctcatgcctataattccagcactttgggaggccaaggagggagaactgcttgaggccacgagttcaagaacaggctgggcaacagagtaagatcccatctcaaaaaaaaaaaaaaaaaaaaaaaagagaaagcagaggggaagctcagtgctggctcttgcaggattggcagggtgagggagatgcagctccaggccccagtggaagactcacttcaccagcagaagatcaactcagaataaaataactgcaggctaggtacggtggctcatgcctataatcccagcactttgggaggccgaggcaggcggatcacctgaggtcaggagttggagaccaacctggctgacgtggtgaatccccgtctctgctaaaaatacaaaaattagccgggcgtgatggtgggcgcctgtaatcccaactagtcgggaggctgaggcaggacaattgcttgaacccgggaagcagaggttgcagtgagccaagattgcaccactgcactccagcctgggcaacagagtgagaatccatctcaaaaaaaaaaaaataataataaattacagattcagtgattccctcccacctcaccaaaccaaatgaatcagaacatctaggggtttgctcagggtatcatttaattttaagaaatttccctaagtgcttcttttttgatttttagagtccgggtcttgtgttgttgctcaggctggagggcagtgatgtgatcgcagctcactgcagccttgaactcctgagctcaagtaatcctcctgccttcgcctaagtagttaggacaacagtcatgtgccactatgctggctaatttttcaatgttttctagagatgaggtcttgctatgttgcccaggctggtctgaaacgcctgggttcaagcaattcttctgccttggcagaagtcccaaagtgctgggactacaggcatgagccaccacacctggcctcaagtgcttctaataagtagcatctccaccaaatgaaagccactgttttggaggaaaaaggtccattagtaggatccctttcctagcatttatttatttattttgatacagggtcttgctctgtcacccagggtggggtgcagcggctcaatcacgactcactgcagccctgacatcctgggctgaatccatcctctcacctcagcctcctaagtagatgggactgcaggtgcacgccaccacaccaggctaattttgtactttttgtagagacagaatctcactatgttgtccaggttggtctcagactcctgggctcaagcgatccacctgcctcagcctcccaaagtgctgcgattacaggtgtcagccaccgtgcctggcccctagcatttattgagtgcccatgccaggccaggcttcatcctcaaccctctagatgcacgttagtccatttgctgtttaccagggctctgctgaggtggagggggaggatggctccttttaatgatggggaggtgacaaagcttatataggacgaggcaagatctgaactctggtgctaaagctgatgcccctaaccacctccgtgagccaaggtgggaacctggtttcctgagaccctggctgagacccagactgtaggtcactctcttcaaagggatggactaagctggtggtcaagagaacagatgtcctggttcaagtcccaccttggccactcactggggaccttcaagaattcacttcacttcaagtcccagcccactagtataagccttcttcaccttaatttttttttttttttgagacaaagtctcactctgtcacccaggctggagtgcactggtgccatcttggctcactgcaacctccgcctcacaggttcaagcgatgcttgggcctcagcctcacgagtagctgggattacaggcacacgccaccatgcctggctaatttttgtatttttagtagagacggggtttcaccatgttgtccaggctggtcttgaactcctgacctcaagggatctgccctcctcaagctcccaaactgccgggattacaggtgtgagccatcacactcagcccccaattttttaaaaaataattttaatttaatttaatttaatttatttatttattgagatggagtctcactctgtcacccaggctggagtgcagtggcaagatctcggctcactgcaacctccgcctcccacgttcaaatgattctcctgcctcagcctcccgagtagctgagactacaggcatgcgccaccacacccagctaatttttgtactttttagtagagatggggtttcaccatgttggcaagggtggtctggatctcttgacctcatgatccacccacctctgtctcccaaagtgttgggattacaggtgtgagccaccgcactcagccaactatacttttgtgtgtgtgctatgaaccttggccatgtgagaatagtgctggctattttattttatgcataaaggcttgtaaatgcataacaaaatagcaagggcttcaaggttaccttttgtaataaaatagctatcaaaatattttttaaggctaggcacagtgtctcatgcctgtaatcccagcattttgggaggctgaagcaggcagattgcttgatgccaggagttcgagaccagcctggccaacatggtgaaaccccgtctctactaaaaatataaaaattagcctggcatgctggtgtgcatctgtagtcccagctactcagaaggctgagatgggagaatcgcttgaacccaggaggtggaggtttcagtgagccaagattgtgccacggtactccagcttgggcaacagagcaagactgtgtctcaaaaaaaaaaaaaaagttttaaaaatggcgatctaacaatgaatatacttctccattaacacactgagtaggccgggtgcggtggctcccgcctgtaatcccagcactttgggaggccgaggcgggcggatcatgaggtcaggaaatcaagaccatcctggccaacatggtgaaaccccatctctactaaaaatacaaacaattagccaggtgtggtggcaggcacctgtagtcccagctactcgggaggctgaggcaggagaatggcgtgaacccagggggtggagctttcagtgagccgagattgcgccactgcactccagcctgggcaacagcgagactgtctcaaacaaaacaaaacagaacaacaacaaaaaaacactgagtaacaaattctagctgtaggtttaatcacaagcaacattttaaagcaatgatgaatgcaaattaaatgttaaggtatctgcagctcttataatgcagtatgaaaatatctgatgtttataagtgacacaggtcatgttgataatattaagggttgataatactaatactaagggtttgttatctccctttaagatggaaggaaatgttaaaatttagttagtggctggtgaaaaataaagacatatttatttttattattattatttttttgagacttgctctgttgctcaggctggagtgcagtggtgtgatctcagctcactgtaacctccactttgtgggttcaagcgattctcctgcctcagcctcctgagtagctgggatcatgggcacccacaagcacgccaggctaattttttgtagttttagtagagatggggttttgccatgttggccagggtggtctcgaactcctaggctcaagtgatttgcctgcctctgcctcccaaagtgctgggattacaggtgtgagtcactgtgcctgacctctgtgtttgttttttaaagatggagtcttgctgttgcccaggctggggtgcagtggcatgatcatagctcactgcaacctccacctcctgggctcaaaatatcttcccacctcagcctcctgagtaactggcactacaggcacgagttaccatgcctggctaattaaaaaaaaattttttttttttttgtagggacaggggcttgctttgctgcccaggctggttgagaactcctagcttcaagcgatcctcctgccttggcctcctgaagtgctaggattacaggcatgagccactgtgctcagcctgatttcagttttctttctttctttcttttttttgagacagagtttcactcttgttgcccaggctggagtgcagtgatgtgatctcggctcaccacaacctctgcctcccaggttcaagcgattctcctgcctcagcctcccgagtagctgggattacaggcatgcgccaccacacccggctaattttgtatttttagtagagacagagtttctccatgttggtcaggctggtctcgaactcccgacctcaggtgatccgcccaccttggcctcccaaagtgctggaattacagccatgagacacctcgcccagcctgatttcagttttcttatctctaaaatggatgctaaagactcccagccatgatgactcccatcattttgaggaactggatacataagcagccatatggtaacactcacaggttgggtctccctgggactccttggcaaacacaagaatgcctaagtaggatctgtggccactggcaggatactgaagccacccttgaggttggggttcttggggccacgttgggagaccatcatccaggacccattgttcccccttgggcttctcccaagcccatagctgtagccccaaggtggtacttaccagaatcccaaaagccatgactttcagcacacattccagagagaagagggaggtgaagacgatgttgaacacccgcagggcattttcataagcaacagaagccccatagaactaggggaaagaagcaggagtagcaggggtcagcgagcaggggtgggaagtgggaagtggggaggcagcttcatggctgttctccaggcaacactccagccccaggcaaggtctgagcaacctcactggtaggaggcacagttcaggaaagccccgctctccgccggactaggctcttcttttcacatccaaaaaaacaaaaacctcccccaaccttttttttttttttttggtagacggggtcttcctattttgcccaggctgggcttgaactcacaatcctaccttagcctcctgatagtcgggactataggcatacgccattgtgcttggctgaattatactttttttttttttttttttttgaggagtctcactctgtcacccgggctggagtgcagtggcgcgatctcggctcactgcaagctccacctcctgggttcatgccattcccctgcctcagcctcccaagtagctgggactacaggtgcccaccaccatgcccagctaactttttgtatttttagtagagacagcgtttcaccgtgttagccaggatggtcttgatctcctaaccttgtgatcgccctcctcggcctcccaaagtgctgggattacaggcgtgagccaccgtccccggcttccttattttttttgagacggagtctcactctgttacccaggctggagtgcagtggtgtgatctcagctcactgcaacttccgccccctgggttcaagcgattctcatgcctcagcctctcacgcagctggtattataggcatgcgccaccacgcccagctaatttttgtatttttagtagagacgggatttcaccatgttggccagttggtcccgaacacctggcctcaagtgatccgcctgcctcgacctcccaaagtgctgggattacaggtgtgagccaccttgcccggccactattgatcgtttttgaagtgccgagaaggagctaaggtccttgcatgaactttctcattcaatcctctcacctcctctggagggggcaaatgtgctcttattatcattcccattttattgacagggaaactgagtccccagaaagtcactggttgcttgtacaaaggtaaatgaattaaatggaagagctgggcttgaatccacgctttggagtccaaagcacagggtgaaaggttttcagagtttttttttggaagccgctccttagccctggggattttagggtcctcacctaccccttctccctcatttctttctttttcttttctttttttttttgagatggagtcttgctcttgttgcccaggctagagtgcaattgcgctatctcggctcatggcaacctccgcctcccgggttcaagcaattctcctgcctcagcctcccgagtagctgggattacagatgcgcaccaccacgcctggctaattttgtatttttagtagagatgcggtttctccgtgttggtcaggctggtctcgaactcgtgacctcaggtgatccgcccgcctcggcctcccaaagttctgggattacaggcatgagccaccgcgcccagccccctcatttcattaatcaaacatttatagagagcttcttgttccgtctgagccagatccttgttggcctctaggaattcagggctgaggtcatcataaatgggtgggggacactgtcatgcaacctgacgcagatttttgtggcaggcgacataaagataggatgcctgctaagatgggcacctcaagcagtcttgggtggtcagggaaggctttctggaggaagaggtctgcaggtacagctgggaagaagaagctggccgggggagtggtgggaacagtgtgtcaggtagagggaacagcaggaacaaaatctcagaggtgatccagagtgtggtctgtctgggaaactgcagatggtttcattttatcagggtagaggcaggaacgaggtgggggttaagtagtgctgggggctggtgtggggcacttaccttcatcataagcacgatggtgttgagggcgatcatggccatgatcgtgtactcgaaaggcggagacaccacgaactgccacatgcggtactggaagctctgcttgttctgcggcatgtgtcgggtcagcggcttggcgctgatggcgaaatcaatgcaggccctctgcgggagagaggccagtggtgagagcggcagaggcaggaggaaggtggctgtacaccgggcaccctctgtctaactcgtcgcggttctcaagtgcttctgcttgagtctctgcctctcttgcccccagccaggattcctgggctctctcttccttctcaccattgctttcttatcccaacagctacagttgcttgagatgtcaccaactgccaaaacttgcactgacatttccccattattgcatggctaatacaaacatgggaagtgggtactatcaatggcctcactttgcagatcaccaaaatagaggcttagaaaggttaaaccacttgcctgaggtgacacagctaccgagtgtgccaaatcaaattgaagcctaatccttcttccccttcctccctccctcgctccctccctccttccttccttcctccctccttccttccctccctccctccttctctccctccctccttccctccctccctccttccctccctccttccctccctcctttccttccttcctccctccctccttcactttcctttttccttccttcccttcattccttccaccctttcccctttctcctttcctttctctcttcttccttctttccttcgctccctttctttcttcttcattccttcttccctatctccttccttccctccctcctttctttctctctctcatttccttccttccctccctccctccctccttcctttttttttttttttctttgacacgggcttgctttgtcacccaggctggagtgcagtgcaatcacagctcactgcagccttgacctcctggactcaagtgatcctcccgcttcagcctcctgagtagctgggactacaggcgtgcaccaccacacccagctaattaaaactttttttttttaatcatagagatggggtctcactatgttgctcaggctggtcttgaacttccgggctcaagcaatcctcctgccttggcctcctaaagtgttaagattacaggcgtgagccactgcgcccagcccattctttcttactgaatactttgctgcgtcttctccttctctttgagggagagagaaggaggaatagtggttattaagtcttaagggtcaagggagcagaggatatattctaggtcctctatttagcttggatgatgccagagaggcaaagagtcatgtctatactctctggtagacaggggactggattttctttccttttctttttttgagagagggtcttgctctgttgcccaggctgtagtgcagtggcataatgatagctcactgcagcctcgaactcccaagctcaagcatcctcccacctcagcctcccatgttactggggctaaaggtgtgcaccatcctgcctggctaatttttttgatttgtagtagagatggggtcttgctatgttggccaggctggtctcaaactcctgagctcaagtgatcctcctgcctcagcttcccaaaatgttgggattacaggtgtgagccaccacacctggcttggcttttcattcataaatattcaccacccttcgctaggggagattgtatttgcccactccactgatgtcagaatggatgtgtgacttgctttggctgatgaaatgtgagcagaagtgacatgtgtaatttttgagcacaagcctgaagaactgaacctcagtctgacatactctctttttcatctggagcatctcagagggaggctgctctgctgctctgccagcctgggaaccagaataaagatggcaagatccacaactgatgttgacatgcagtgtgagcaaaaaataagtccctttgtggatatttggcaatgaaatctggggttgcttgttactgcggcataacctagtctaaactgactgatacatacactatatgatgtgtttcctctggaaactccatgaagggctgccctgaagactggattcggttgggacaatgcttctgttccctcccccaggtacccctagaaaggggttcctgggtgttgtgtgtgttttaaagtttgtgtgtgtccccagtttttaaaggacagatggaattggaagtggcacctcatttttctccaggctgtattcctccatcatcttgtccccttgctcctggaaggtgatgatgatcaaggccacaaagatattgacaaagaagaaggggaacaccacaaagtagacgacgtagaaaatggacatctccatgcggtacccggggctggggccctggttctcaaaggtggcgtccaccgaatgcttgaggaccctgcaaggaatggggcagggagagggaaggggcaggaaggagagagacagggacccaaggggtgatgaggaaggtggagagagggtggaagtgagatggcagaacaggaacagagggaaatgaaaaagaaatttaagtagtcgctgttttttgaaaggctgacaacaatgtcagttatttcttaattttaattttaattttttgagatggagtttcgctctcgttgcccaggctggagtgcaacggcgtgatcttgggtcactacaacctccgcctcccgggttcaaatgattctcctgcctcagcctcccaagtagctgggattacagacatgcgccaccaagcctggctaatttttttgtatttttagtagagacggggtttcaccatgttggccaggctggtcttgaactcctgacctcaggtgatccacctgcctcggtctcccaaactgttgagattacaggtgtgagccaccacgcctggccaatgtcagtcatttctactgctgtgcatgaagggcttgctgtgtgctggaaacaatattcaacaattcatccccaccggctcagcaaccctcccagggaggttattactggctccactttgcacatgaggaacttgaggttcagcaatttaaagggacgtgctgaagaccacccacttataagtggccaagttgggatttaaagacaggttgtggcaatggagggagtagaggtgggtgtatgcatgtagagtgggtatttgagcacaggtggtgctgggtgctcaggaggtacaatggggatatatatgagagtgggtaagtgcacagcagctctgtacagtagtgcaggttgcacactgctcaaaggctctgtgtctaagcgataccttcacatgataggcatgatagatttgtgtattcatgatgacaattttttggcaggtggtccttcagtgccttgtttgaacaaaatcatttaagtctattgcgatgattttcagacagatggaaatgaagtctgttgagaaaggtgtttaaaaaaactttgctcaaaggtgccttgtgggttagcattattcccacatgtgtgagtactggatgtgtctgagagtgggtagtagggcatgttcaggttggcatatttgctgagagagggagggaggtgaggatgctgagggcacatgctggaatctaccaagcttccagcctggcatttccaagacctctgagagaaagaccattacttggacgaggtgagggagggaggcatttgttttgggtgcaaattaagggggtactgaaaatctcagtaatcaagataatcttttgctccaatattttaaaaaatcaaaattaatgcaaaaagtccatgatgaacaaatatcaatttcttcttctttttttttttcagggataggggtctccttctgttgtctaggctggagtacaatggcataatcacagctcactgcagccttgaactcttgggctcaagcgatcctcccacctcagcctcctgagtagctgggataacaggtatgagccaccacaagtggctcaaaattttaaataaagactaagtccatgattcagcctcacttttttttttttttgaaggcggggaggccatagtcttgctctgtcactcaggatgaagtgcagtggtgcaatctcggctcactgcaacctctgcctcctgggttcaagtgattctcgtgtctcagcctcctgagtagccgggaccacaggtgtgagccaccatgcctggcagcttttttttttttttttttttttttttttttgggatttttagtagaaatggagttttgccatgatggccaggctgatctcaaactcctggcctcaagtgatacatctgccttggcctcctaaagtgttgggattacaggcgtgagccaccatgcccggcctccaagacctttcttattgctaagctctcaggccctttatcctcctgctccccagggctcctcctggatagatttccagtcgggccacttactgtggccagccttctcccgtggacacggtgaagagggtcagcagagcccacagcacattgtcgtaatggaattcatacttcttccactcccggtctcgcgccttcacctcattcttctcgtagaggaggtatttgcctctgccacagagagtggggactgttagtaaatgggaaagaggggctgtcttgcacttgtctttggttatcagagacagggggagggaaaggaagagtggtccaccagcctagactgcttgggaagcagtgactccccatcctgccaccatgtgttcctgtgcttcataggggatgacgtgtgcatctactttgagataaatccatgggtgatggcacaaccttactcctggtgggagagctgacccagggtccagcaccctcttccaacgtgataacttctagtcctcagggtgagagcctcaggcttgctgggggtggggtggagggagtttaggaggaggcagagagacataggggacatttagaggttcatcaggctaagggaggttgctactccttttcaaggcaggaaacaagggttagttccagactcctatccagacatctggcatcctcctaatttcaataaatagccatcaagataacaacaggctaccatgtgttgcaaaatgccactttacactggtaacaatatcactatatatacacatacatatatatacacacacacatataatacatatgtgtgtgtgcgtgtacatatatatatatacatatatatatatatatatttttgttgttgttgtttgtttgtttgtttgtttgagatggagtctggctctgttgcccagactggagtacagtggcccaatctgggctcactgcaagctccgcctcccgggttcacgccattctcctgtctcagcctcccaagtagctgggactacaggcgtctgccaccatgcccagctaggtttttgtatttttagtagagacagggtttcaccgtgttagccaggatggtctcgatctcctgacctcatgatccgcccgcctcggcctcctaaagtgctgagattataagcatgagccactgcgcccggcctatatgtatatatttttgagaggcagggtctcactctgtcacgcaggctggagtgcagtggtaccatcatagtgcattgcagccttgaactcctgtgtttaaacaatcctcccgcctcagcctcccgggtagctgggactacaggtgtgtgctaccatgccccgctaacttttaaaatttattttgtaggatgggctctcattatgttgcccaacctggtctccaactcctggcctcaagtgatcctcccacctcagcctcccaaagtgttggaattacaggtgtgagccactgcacctggcctcttacctaacttatttggtaatgaaacctgatctgattggacatgaagctctttatacttgttatttaccccatttgatgtaaatagttacacattttatggcagaaatattgtgtttgattatagggctgccttagacccagctgagggtgtcatgtcccacatgggaatctcaaaatattctcaactttgaaacacatctgcctgtaacgatttcaagtaaggaactgtggatgtgtattaatatccctcacatgacaaaggcggtggctgaaaggtcaatcaatttgcttatgactcattctgtggctctgggtggtgactcaaattctaaaaccggttttctttctacccaagatccaagctggttgcaactgagtcacttccaaggctcatcacttctccagtctctgagcccaagtggccaatgcctctagccacttcccccctgcccacctgctggttccaatgggaatgtgctggaaagtggagacccaccgacaatctttctcaaactctttggactcgtcagtgcagtggaagaatttccccttgaagagctgcacagccaccacggcgaagatgaacatgaatagcatgtagacgatgaggatgttgaagacgtttttaagtgagttcaccacacagtcaaacacagcctgtggggtggagttgacagagagcatgaggggctggggacctgcccaaccttctgcctccagtggcccatcataccaaaatactgccatgatcattcccattttacaggcaaggtcataagtcaagtcactagggtaaggtccccccagctttcagaaataagcgttggaggagttggactcaatcctggcattctatggatctaaaactcccagatgggataccagagatgcttttaagtgatacaggagcccaacacagaaaaacaaggtaacaaagttacttcctttccaactctctcaatccttttgagtgaaggagaaatttttacttagttgctaccatgttaacacctaccattgacattttccctctttaaccaagaaagagcagttgtcaatgcacaaagccttaggcaggcagccatatttggttagatttccataacagtatctgttttctgtctttaatttttagtagagacagagtctaactatgttgcccaggctggtctcattctcctgggctcaagcaacactcctgccttggtctttcaaaatgcagggattacgggtgtgacttgatttaaagaaacatattacataagagataatactggggacccccaggtgaagcatagagtgaaagtgggtgctctaatgactggattttatttcccttaatatatatatatgtttttgaatgacaggcttttgggaaatgctggttcatgctattttggaatgggagatactagagcctagaataggtagatgaaaagtcaaaattttatggaacaagaaatctagttcctgcttcccagatcacggttatacccttttaaatccatatgatgccttcatgcgaattaggaaaaaggatcttaaccccaagacacttcatctaaagaaaaactgccataatacacagattattttaggtcagctcactttactgccatctgctgggaagttgtaataatacaaatatccatacacgatggctaggatgttatcagcacctcctttaatgtgttgtccttgagcagtgtacaacctgctcagctgtacatgataaccctgacagtcccccccaccgcaccccaccatctcccaatctcaccttgagctttggcagccgcttgatggttttaagaggtcgtagcacccggaggactcggagggatttaatcgtgttgatgtcttttcctttgctattgccactgtggaggaatgtttaggtgggaagaagggaagagaggaagcagaggtcaggttgggtagggggcagcccacagctccatgggaccctaccctcccaggcctagaagtctggggtgagcttggcacagccctgcccttcctggtgaagagtggtccatttcacctgttaagcttgggctcgggagccagtaagtacgtggctttttgtggttctggtcccagggttggttgagggccctttgccatctggctgggcctgagcagctgtattgggtgtccctgagacccagcacaagggggttggctgattccccacccccatttctgcacagcttttcttttttcttttttgagacagggtctggctctgtcaccaaggctggagtgcagtggcacgatctcggctcactgcaacctccgcctcctgggctaaagccatcctcccacctcagcctcccaagtagctgggactacaggcacacgccactgcgcctggctaattgttttgtctttttgtagagatgaggtttcaccatgttgcccaggctggtttcaaactcctgagctcaagcaatctgccctcctcaccctctcaaagtgctgggattacaggtgtgagccactacacctggtcacagctattttcaaaaaagcccttggtctaggagtttagtggtcccctatgtattcttttttttttttgagatggagtttcactcttgttgcccaggctggagtgcaatggtatgatcttggctcactgcaacctccacctcccaggttcaagtgattctcttgcctcagcctctccaagtagctgggactacaggtgcgtgccaccatgcccagctaacttttgtatttttagtagagatggggcttcaccatgttggccaggctggtcttgaactcctgacctcaggtgatccacccaccttggcctcccaaagtgttgggattacaggtgtgagccactgcgcctggccccctgtgtattctttttaaaggtggtatcagtgggctcttaaaaaaatgggattttctcccccttccaatgggattctggaagatacttaaagtggcccttataccaaatctcccctcccccaccatattccctgagtctgaaggagggaaaataaccgggtgccgctgttttcagatgctgatgtggctgctgccatggtctctgctgcattgctccaagggtctctgagcccatctttgccagagaggactgcacagaagttcagtccaaggtctgttggaactgagcttagcaatgcagaccccagagatgccatgacacccttggccaaccatgactcaggccccccaagaggagggtattgagtgggaccatgaatagcttgtggttcatggcactcatgacccatccagttgtccacaccagaaacctgagagtcatggtcaactgcctgccctctatccccatccccatccccagtgggtcaccttccttaacatcccgccatccattcctgggtgccatcccccctcacccgtctcccaacttgctcctcattccctgccttttcttccatgttttatgcacacagtggctaaagccaatgaccttgtcactctttctcttgctcagaattcttctggagcacgtgaattctcagaagagcaagtgcaaacttctgggcatggcattcaatgctcttgaaaatctagtccaacttaccttcacctttgcattcccatttatggctacatatctcaagccccagccacattcttttgcctctgtctgcttatgcatatactgttcccgctgctagaaatgcccttcctccacttctccagtcacagaactacccggtcctcaaagcccaaattacctgttgctccctccgacagcatttcctgactgcctacctctggctcctgccagctcctatgtgctatttcggagttaatctttgtttgtttcttcggtctctggttttagacagaaaactcttcaaaggcttacagtgtaatctactcttctctgtgttcattttccctttaatctttttttttttttttgagatggagtcttgctctattgcccaggctggagtgcagtggcatgatcttggcttactgcaacctctgcctcctgggttcaagtgattctcccacctcagcctcccgaatagctgggactacaggcatgagtcaccacacctggctaatttttgtattttcagtagagacagggtttcaccgtgttggccaggctggtctcgaactcccgacctcaagtaatccactggccttgactcccaaagtgctgggattacaggcatgagccaccgcacctggccatttcccctttaatcttgattcttgtcctagcccctagcctgcgcctggcgtgtggtctcaggacacgtgaatgcctccggttggagtatttgggtggggaggtcacctagaaaacatctccctacagtgacctcccaggtcatgagcagagctgccccagagacccccatcacgatgggtctcagtatccagtgcaaaaacatcattcttcacaccatttgctttttaaaggactccatttttttcatttttcagggaacaaagacgataattgtattttagcctgctaggcagagatatactccaggattcagaactctgaacctttttttttctttttaaaactaacatcatcattatcatctcaaggctgtgcccccaagtgtgagacacacgttggacagtcactgagataattttaggcagaacaggggcacagattaaataattggatctcagaggggcataatcatttctttttctttctttcttttttattatactttaagtttcttttccacgtatctttcagacgctctgcttttgcgagaaaggaagcctcaggtagatgctaataggcctttaacacctccctaacacttagtaattttccttttaacaaagagcccagcttgaaggcaacaacattgtctggtttctgttagatttactttttttttttttttttgagatggcatttctctcttgttacccaggctggagtgaatggcgtgatctcagctcacagcagtctctgcctcccgggttcaagaaattcttttgcctcagcctcccgagtagctgggattacaggcatgtgccatcacgtccggctaattttgtatttttagtagagacggggtttctccatgttggtcaggctggtctcgaactcccgacctcaagtgatccacctgcctcggcctcccaaagtgctgggattataggtgtgagccaccatgtctggcctacatttacttttgcagttgcagatttatcttaggttagcaatgctggttgtaagtggataatatagtttcctttttttttatttaaattaaagagatggaatctcaggggggagtgcagtggcacgatcatagctcaccgcagcctccaactcctgggctcaagtgatccttcagtctcagcctcccaaatggctgggactgcaggcatgcaccactgcacctggctaaagtttccttttgaaattgaactttagaatacatgttgatagaaaaaaagtcaaggaactgtacatccaggttgcacatggaactggctaaaatcttgatgtcccaaacaagtgacaattgggagcatgtctccatgggcattctgcatctcctcatctgaaaacgattccatggccattttatttttttattgttcaatttattttatatatttttttgagacagagtctcactctgtcacccagggtggagtgcagtggtgcaatctcagctcactgcaacctccacctcccaggtttaagtgattctcctgcctcagcttcctatgtagctgggattacaggtgtgcaccaccaagcccagataattttttgcatttttagtagagatggggtttcaccatgttgaccaggctggtctgaaactcctgacctcaagtgatctacccgcctcggcctcccaaaatgctgggattagaggcgtgagccaccgtgtctggcccactttcattgcttctgataactgctccacccagcttgcctattgaaactgaacctctgccccttctgttctctgcaagaactggtggggcatgggcggaggcattggcaagaccctttgggatgcctccttcgcagggagtgagttctggtcatttgaagcgacaggacagcggcagcaaggacacaaggccacagaaacaggcccagaactaacgaggctgcaccaggggacagatcacgagagacagaatatgagagagagagagagagaaagagagagagagagaaagatagagagagactttaccgtgtactgctcctggtgatgtggcatcggagggagagacagatcgtaagtggcctcagaaaaaagaacacagaacacgcacgtacacacacgcacccctgagcacccccgagtcccgcccgggcagcagttgggggagcctcaggctcatggcgctggccgatgtccatccttccatctggaagccgcccccacctccattcagtcccccgcccttggcaggcacctggcactgcccaagaaagcactaagaaagccaaatttccaggtagcaggacagctgcaaagctgtcagttaccaaaggtgaattcaccacggaaagtcactgccaagagccggagaaacccctcttctccaggcgttgtggagctgcaaggttttagaatgtctaaaaggttgtgagctttgaagttgaggggacctgggtttgaatcctgactctgcctctcgttatcctcatctgcaaaacaggcccagactgggtgccgtggctcacagctataatcccagcaccttgggaggacgagttgggaagattgcttgaggccagaagttcgagaccagcctggacaacatagggagaccctgtctctctccttctctcctttttttttgaggcagggtctccctctgttgcccaggctgcagtgcagtagcgggatcttggctcactgtagcctcaacctccagggctcaggtgattctcccaccttagcctcccaagtagctggaaatacaggcaaatttttccattttttgtagagacgggggtctcattatgttgctcaggctggtctcaaactcctgggctcaagtgatcctcctgcctaggcctcccagagcgctgggattacaagtgtgagccactgcatcctgggcaagactctgtctcttaaaacaaacaaccaaccaactcaggtctgtggaattctgatgtttgattaacaaaagctatggccttggctttgctctttatgaaggagggggtcagcaaagagttctgacttgggatggaattagaagcaactctgaagccctctgagcaaatgcgggcctggggaaagctatcagcacctagcagctggtcctctcgtgattcattggaatcaggcttggggctcattaggcgccttcaacaatgactggagatccaggttagaaagacttgaccgccatcagaatggcggaaaccctgtcgccaagcggactctatggaattttccatccacgacccctctggaagttagtgatttttttttttttttttgaaacggagtctcgctctgtcgcccaggctggagtgcagtggcaagatctcggctcactgcaagctccgcctcccaggttcacgccattctccttcctcagcctcccgagtgctgggactacaggcgcccaccaccacgcccagctaattttttttgtatttttagtagagatggggtttcaccgtgttagccaggatggtctccatctcttgacctcgtgatccgcccaccttggcctcccaaagtgctaggattacaggtgtgagccaccgcgcccggctgtgatattttttaaaacacagaatggtttaaatgtctacaaatattccaagtggattctcctccacaccccctcatctccttttcctgtagtctgacttggggttctcaaattcagtgtatctaggaattattgcatacgtagaatcatatagattctactttttttttttttttttttttttttgatggattctcactctgttgccaggctgcctcagccttccaaagtgctgggattacaggcgtaagccaccgcacccggctttattttatatttttagagacgtggtcttgctctgtcgcccaggctggagtgcagtagcacaatcatagcttaccgcagccttgaactccctggctcaagtgattctcccacctcagcctcccaagtagctgggactacaggtgagagacaccacacccagcttctttacggatgattgagggagttttcaatgacagtgatttttgcctaatctgctgactttaggtttaatatgggagtcttctggacatcactgcatttgcctatgggaagacagcaccattatgaccattttccagatgaggaagctgaggcctagagaaaaagagtgacctgcccaagggcaggcacacagctgggaagacagactaagattcaaacccaggtgtgggtatctcgcactctaatcttctttccatttcatcatacacaagaaaaataatgccttcaggggtgggggctgttttgaagatgaggatcaagagatagcagcctgagggctccatctttggcttcctgacagtttggctcctgggtatgcaggagcagcttgatcaaggcgctctgccagttgcggtcctgcctttgggggaagaacagccgcgccagatggactcttggcggtgagggcaggatcatgatctgccagctgctgagaaatgtcagttggccgccctgatgcatgggcacagagcgtgataccacgtgtgatggctcatgaaatggggtgtttatggtagacgcatggatacaagggacacagtcagtgaattgagcaggacacacacacacagatatttgggtgaggtgcaggaggggtggacatcttcagaagagcttcaatacatcccttggtgggaccacagggatagttttctcccatatcggagacgaggccacaatcacagcactgggggaagaatccttgctttgaccccaacaggccagaatggcaaggttcctttcaacaaggaagggaataaccttatgctcccttcccctattcccttcccctggatctcgcagccctgccaggcctcaaagaacccaggctggccaggctgctgagcatcattctgctcactgtgagcctccgtattcagggctgggagatgggtagcatctgacagctgaacccaacctcagtgatcttgtcggacttacttccctccacagtccctctgggccgcagtttcctcatctagatgggaaaaactgaggcacagagaggctaaaggacttgcacatctagagagaaatcaaacagacctggagggacaatttcttaaaacaataaggtcaatctaatacttgtggggctctcagccttgtctatgaggggatatgcacagaggacagacaaagcaagttaaaagaccagaaaggaaataagcagaggaccctggggtggggggtggggggcgggtggagagttcagcgctcaggctgagaacctcagagcatccatgctccttccaatgtgccaactatccgataacaaggaaagacaataagcaaagtcctcatagggtgagagaccttctcaggcaaaagaggccagaaacctgtaacggggagaagattccaaaactttttagggaaaaaagcagtagctcctattctggttttctagcagtttggctcttaggtgtgcaggaatggcttgatcaaggcacctggccagctgtgctgggcctgcagccctgccctgggggaggaacagcagtaccagatggactcttgacagtggggtggggagggtgtggtaggcgtgaggtttgagggtctcctctctcatcccttcggccatgatataaagatgctccctgttggactcatgtccgtcggctcttccaaaaccctgggagagtcccaggcacttgccaggatcctactggcaaaatctcacacctcccagttcctgcatgatctacaagcctgccagggttgacaggatggcctgaaatccctatccagatccttttcttgcataagaattaaaacaacaacattcaaaatggattttcaagagtgaagggtggctttatgcctgtaccaatttcatgagaacaatgtaaaagcttgactctgcaaacaggctgccaaattcctgtgagttgtaggccaatttgaatgcccttgtataacttgatatttaaaaagaaaactcagaaattaaaaaaaaagtcaactccccaaaagaatcattctgctgttttttttttttttttttttttttgagatggagtcttgctccgtcacccaggctggagtgcagtggcacaatcttggctcactgcaaccttcacctcctgggttcaagcaattctcctgcctcaccctcccgagtagctgggactacaggccctccccaccacacccagctagtttttgtatttttagtagagatggggtttcaccatgttggccatgctggtcttggacccctgacctcaagtgatccacctgcctcggcctccccaagtgctgggattacaggtgtgagccatcgcacccagctcattctgctaattgatctctggtggaaaagaatttttggttcgcttttgcagattagctttgtttaaaagaggaggctaattttacctccagagaacctagaaacagcatgttgtaaacgatggcccataatggcaaaagctcaacaattgaaaggcttgcttctgggtcctttgtaggtcattcccctccctaaattgtgatggtcaactcggaggatggaggtgggacagtcacctcctcagcatttttttttttttttgagacagagtcttgctctgttgcccaggctggagtgcagtggtgcaatcttggctcactgcaacctccacttcccaggttcaagcaattcttctgcctcagcctcccgagtagctgagattacaggcgcctgctatcacgcttggctaatatttgtatttttagtagagacagggttttaccatgttgcctggggtttcaccatgttgcccaggctggtcttgaactcctgaccccaggtgatccatctgccttggcctccgaaagagctaggattacaggcatgagccactgtgcccggccctcctcagcattacagtatgtcagctacaacagaggtctgagaggaaagtgacattggagacctgaacagcttgggcttggtaccatttatctgtgccacactcagtggtggtcactgggaggattcacaggataaaacccattcccctgggcacaggtggccaaggtaagcattgtgtgtggacaggtggatatgagtgacatattcaccccactgcctgccctagtgccctgagctacctgccacctcttgagccctaggaatcttggaggctgctgagcagaccttgccccagaggaaaggggcgggggtccctgcctgagcatgtcctcctgtgtcctgggatctgcctttgtctgaataccattcctcatcagaatgcagggtaggggggccaagtccctgttgccagaccgatgacagagggtcagctttctccaagctacacggtccaggggaggcccacatcacccaaggacataggtcatcaacagtgcagggagtgagagagaaagagagggagagagagagagaaagaggaaaataaaaagatagaaactgagagggggtaaaaggagaaagacgaacagaaagagacagagagagggaagaagagagagggaagagaggggaaaggaggaagagaaagagggagaaagaaaaggaggggagagggagggaaggggctgaaaggcagagaggggtggagaaacccgtaggttatttccataggagaaggattcattccaggctgagggtggtaaaacattctggcttttcaggatttaaattttctcatagcatgatgtctacctgacaacttgaaggacctgcttaaataggtgatagagggggagaaaagtatattttattataatacattcctttttttatttttgagacaaaatcttgctttctcacccaggctggagtgcagtggcatgatctcggctcactgcagtctccatctcctgggtccaagcaattctcctgccttacccacctgagtagctgggattacaggcatccgccaccatgcctggctaatttttgtattttttagtagagacagggttttgtcatgtcggccaggctggtctcgaactgctgacctcaggtgatccccctcccttggcctcccaaaatgctagggttacaggcgtgagccactgtgcccagcctattataatacattcttatatatgctgtttattagctaaaaaaatcattttttgtgtgtgtgtgggggtgcggcgggaacagtgctaacttgatagggaatgaattgtatctcgtttttattttacatttctctgaattccaagggttgatttacctccatttttactagttgccagcattctatcagatttctgtttatgtcctttgcccatttatccattgagaagtagtgtttcttattgatttgtaactgcttttcatattttaaagacatggactccttgtcttattcgtcacaatctttgtcccctaatttgatgtgcattgtattttgtttaattaattatttatttatttactttttaacctacagaacagcttgctaaacctgttttttttgtactcatcactattaaaattattcagtaaccatataaagcataatattctaaatagcaaattcattgatttttaattttttaaactttttatttttttgagacaagttcttcctgtgttccccagactggggtgcagtggtgcgatttcggctcactgcagccttgaacctcctgggctcaagcaattctcccacctcagcctcccgtgtagctgctagtgcaggcatactaccatgcctggctaattgtttttttttttttttagagatggggtctccctatgttacccaggctggtcttggcctcctgggctcaagcaatctgcctgtctcagcctcccaaagtgctgggattgcaggtgtaagccaccgtgcattgctctagtagtcaaatagacactgaaaagctttgaggagagggaaggatgtggggagggagaggagaagagaaaaagaaaagagtaaacgaacaaaaagagaggagaaagaggaggaaggagtgaaagagaaagagaaagaagtataatcagcctcccaaccttcatgatacatctccagctctgaggcatccaaaaactctggagattttttgttctaacacaacttgacctcattgtgttcccagagaagaatctaagtgtggcctacttaacagcccttctactggaaatgggccactattttggccctcctgacaaaccaagtcctcattgtttggtgagggagaccattcaagggcccctccagattggctcaggagggagcctagaggcagaggcacaggaggaagcccctgattctctcacgatgggagtgaatgtgtcaagatcctttcaaaacctgtcagggaatcattcaccatgatgggcacagccagggtccccaagatttgtttcttgattaaagactgattagatatttttcatcccgctccaaatgtctacaacttcaggaatgtactgctaagtctgctatcagggccctaagggctaatggccactcacctgttgggtaccatcttgaaatagtcacccagaacttgggggccattttgaaatggttgccctagaacttgggtgccattttggaatggttacccagaactagggtgccaccttgagatggctgcccagaacttgggggtcaccttcgagtagccatccaagacttggggaccgtcttggaatggctacccagaacttgaaggccaccttggaactcagggaccatgtaagaatggccaccaagaatccagaggccatcttagcatggtagcccagaaatcagaggccatcttggaatagccacccagaacttggatgccaccttggaatggttgcccagaacttgggggccaccctggaactcaggggccatcttgcaatggctgcctagaacttggggccatcttggaatagccacccagagcttggggaccatcctggaatggctacccagaacttgaaggtcaccttggaactcagggaccatctaagaatgaccaccccaaattcagaggccatcttggaatgatagctcagaactcaggggccatcttggaatggccacccagaacttggatgccatcttgggatgactactaagagcttgggtgccatcctgaaatggctgcctacaactggggcgccatcttggagctgcaggatgacacatggcctttcagagggcagagaatcctaggactgccaggagaagtgaaagacacacaaagggagtcaccaggtctacaactacggggccttcaggcatagggagggggtcagaattctcatgcacattcgtttcctgattgtctctttagggactttccaaagagacagcggtttgggcggcgcttgtggagtagtagggggatgagatgttccggcgaggctagtctacaggaagctgcacagcaaggggccagtgatgtggctgaggcccgttgctgtgtgaggaggtagaaggttggcaggagggggggtcccttctccttcttcctccatggacatcatgcaaaaagccatcgaagctcttcctggtggcatgctgatatctcccacgtccccggagcccacacaccccatccctagaccctgagaacatgtcctgtaatccgatgtgtggcccaggctgggggttgggggaaaagaggcaagaggaacccttgcgaggagacttacgtgaaggcaaaggctaccagggccccactgaccactatgaagtcgagaatattccagaggtcacggaagtaggcaccctgatgcaggacgagccccaggtcaatcatctgtgggggagaagagagggtgctcagaacccccacctgatccccaccctggggtgctgccacccactctctagcctctcggggagaggcagggaagccaatgaggccacctcatcttgcagggatgggcagtggccagaggactccagggaggagtggggagcccctgccccatgaggcggcccccctttgcctgatggaagccagctctggcttgccggctcttagatccaaactttgggatcctctttgatgcctctttgtcccaaatccctcattggtggctctatcagcaaaactcactggctctatttccagaaccttccaagaatctgtccacttctcacctcttctttggtcaccagcctgatcctgtccccgtcatcgcccatggggaccagtgtgatcacctgctcacaggtcctctggcttcccacagatgccaaagggcacctgtgaacacctggatcaagtccctcctctgctcagaacactctatggccctcacctcactcaaagtaagagccgaagagccctctctgtgatccccggcacaaggtgccccctcacctccccactcatctctctgtccttcgtttccccactgttctctcactccgcccagccacaccagcttccttgctgctcttcaaacacaccaggcatttctaatcctctgggagactcatcctctcaaggggggcattcttggaggctcaggatctcctggaatcccagctcttttttttttttttttttttgacagagtctcgctgtgtcacccaggctggaatgcagtggcaagatctcggctcactgcagcctccacatcggctcattgcagcctagggttcaagtgattctcctgcctcagcctcccgagtagctgggattacagacatgtgccaccatgcccggctaatttttgtatttttagtagagatggggtttcaccatgttggccaggctggcctcaacctcctgatctcaagtgatctgcctgcctcagcctcccaaagtgctgggattacaggcatgatccactgtgcccagccctgcacttgcttaaaaaaaaaaattaccgtgtgttctcacttataatctgcactcaccttgatcaccatctcaaaggtaaagacgcctgtaaaaacgtagtcaaagtatcgcagcacctgtaagggataaaagcaagagagcagtggatcactggcctgttccagcagagccccggtaaaactaacgatcgcctactggggagcagagtttctacccagaagaggaaacacagctgctatatacagttgcgcagggcgtgcactgcacaagggcccctcccatctcttttcatactgcagatttgtatgttgtgaatgaaattgtccagcagatggcagcaaatcctaacaaaaaaatcactgtactaggccagttcgctaacccacgggaagggtaccttttaaaatttgccccaagccctgtagtggattagaagcggccccagagaagttcagggctgactgtatccttcttggtgatggatctaatcccccagtacccttgctttcctgggcatcctgggcgagaaatagttgctacgtggtttttttaaacactggggccaacttcctgccacggcatctcttcctgcttcaaggccaggcccctgccagggtaggttgatttttcctgtgcccctccccaggcctgatgtttctgcctggacgagcaatgtcctctggcccagcccctgtccaggacacaccatagcacacctctggtgtcacccaggcctgaagatgagggtgcgccggcacagtgtctggctggtgctagacatggggtggacaccggctgggcacggtggctcgagcctgtaatcccagcactttgggaggctgaggcaggcagatcacttgaggtcaggagttcgagaccagcctaaccaaatggcaaaaccccgtgtctactaaaaatataaaaaattagctgggcatggtggcgtgtgcctgtaattccagctacttgggaggccaaggcgtgacagtcacttgaacgtgggaggcggaggttgcagtgagccgagatcgtgccactgcactccagcctgggagacagagactgtctaaaaaaaaaaaaaaaaaaaaaatcagatccacccagaagctgcaagggctgagcattactgaacatggccaccagagggcgctgtgaacaccaaagaagtcaggcacatccttcccctgcttacaatcctccgtggctcccacctcattcagggataaaagtcaaagtcctccccgaggccctcaagcccctgcacgatctgaccattcagctccctgccctcacttcctctcattctctcccttgctcacttccttttgttccccaagatgcttccacctcagggcctttgcacaggctgttctgtctctctggaatgctttcccccacatcccatttgattccgtctttctcctcctttatgacttagctcaaataacactttcccagtgaggactcccctgaccggctgtttaaattccatctcctggtgcttgagatcctctttacgaagtctctccttccctctgcccaccacacccccggccacttatcactccctgaacatttgttgtagttactgataatctcattgtccatctcccccacccaaatgtcagccccacaaggacagggatgtctgtctgtcaccatggcgtctccagcttataatacagggtcaggaatacagtaggtgctcaagaaatgtttgttgaatgaatgcatcaacagttggggctgtactgggtcctggaggagctgggctctgtgatctgtgtggttataacttatattcctgttatatgtggtgcttgaagaggaatcagagaccagagtgcctggggtcagggtgaggtgacttcctggagggaggggctggtgcaaggggattggcttgaaagacctgggtgggcagaggggatggtggtgggagagtatttcaggtgcacgaggcagtgggcacagcctggtcaaaggcctggtggtttgtgggctctgggagtgcagggaccatctcataccctgtcaatcctccctggctcgctcagtacctggcacatagtagttgcttatcaaatacttactaaaggaatgaatggaaggaaagaaggaagagagggagctgggaaagggcaggccgtgggggtcaggtgaatctaattctggagctcttaataagctgtgcaagaggaaatcaaaagaccaataaattaggttcaagtattcctaatacttagatctttttcatctatttgaaaatgttatttcctgtggctcagtctaatccaaaaaagtgcttgatctcattcattacagggaaatgccaagcacaaccccaataagatctcactccacacccagcagatcggccaaatgaaacagtcgacagtaccaagtgttgacaaggatgtggaagaacaggagttcccatgagctactggtgcaagggccactgcgttcatttattttttaatttttttttgagatggtgtctcactctgtcacccaggctggagtgcagtggcacaatcttggctcactggaacctctgcctcccgggttcaagcaattcttctgcctcagcctccaagtgtctgggattacaggcgcatgctaccacgcccggctaatttttgtatttttagtagagaccaggttttaccatattggccagtctggtctcgaactcctgacctcacgtgatctacccaccttggcctcccaaagtgctgggattacaggtgcgagcccggcccactgtgcccggcccactgtgtttatttttatttatttatatatattttggagacagggtctcgctctgtcgccaaggctagagtgcagtgacgccatcttggctcactgcaacctccacctcctgggttcaagtgattcttgtgcttcagcctcccgagtagctgggattacagttgtgtgttaccacgcccagataatttttgtatttttggtagagacggggtttcaccatgttggccaggctggtctcaaactcctgacctcaggtgatccacccgccttggcctcccaaagggtcactgtgtttattgtccaataaacattcaagctgcatttactgaggccaaccacttgcaaattatatgctctagaaacttcgcttttggtttataccctggaggaattcttatttattgagacagggtctcgctctgtcacccaggttggagtgcagtggtatgaacatggatcactacagccttgaccttccagacccaagtgatcctcccacctcagcctcccaagtggctgggaccacaggtgtgcaccaccacgctcggttaattaaaaaaaaaaaaattttttttttttttggtagaggtgggggtctcactatgttgcccaagctggtcttgaactcctggcctcaagcattgctcccaccttggcctctcgaagtgctgggattataggcgtgagccactgcatctggcctcctggagaaattactgtccaggtgactcaggaaacatgttgaggggcgtggcatggggacagtattcacacttagaaacaacccaaacatctgtcaacaggggatggataacacatcccatgccacacagtaaatctcaaaacagcatcataaagaatgctcattgaccgggcgtggtggctcacgcctgtaatcccagcactttgggaggccaaggcgggcggatcacttgaggtcaggagtttgagaccagtctggctgatagtgtgaaaccccgtctctactaaaaatacaaaaattagccgggtgtggtggcgcctgcctgtagtcccagctactctggaggctgaggcaggagaatcgcttaaacccgggaggcggaggttgcagtgagccaagattgcaccactgcactccagcctgggtgacagagcaagactccatctcaaaaaaaaaaaaaaaaaaaagaatgcccatcaatcctgcaaaagcaacatgtactcatttaatgcgaagcatagaagtgtctcatttattgaatgttacagaagagcaaacataaattcagtttttaagaattggccagtgttggccaattacaggcatgtaagaattggaattacatgcctgtaattccagagctctgggaatctgaggagggaggattgcttgaggtcaagagttcgagaccagcctggcaacatagcgaggcccgtttctacaagcatttaaaaattagctgggtgtggtggtgcatgcctgtggtcctagctacctggggggctgaggtgggaggatcacttgagcccgggacgttgaggctgcagtgagccatgatcacgttactgcaccccaacctgggcgacagagagagacattgtctcttaaaaaaaaaaaaaaaaaaagcctgtgcaggtgggaaaaagagagaagccaaaaacgctcattccagaagctggggtcgtggttaccggtaaggcagggtttctcaagctgggctctgtggacatttgggtctggatcatcctctagagtgggggctgtcctgggcatcggcgggtgctgagcaacatccctggcctccacccaccagatgccaggagcacctcccccctcctgtcgtgacaaccaaaaatgtctccagacagtgtccccagcagctctagagggaaagaaggcggtgggggtgggggatcgaggaggcacatgccgcgtggggcgtttttgttctatttcttgccctggatggtggttacgtggtgtgaacgttatggggccacagtgttcttgtagagaagtttcgactgcgagatggacgagggagggggccggggagctgaacgctctttgcaaacagtccctggggcctggtctgagcactgcctagattcccttcagccctgggagctgccgtgccccctggatcatccatgcctgtgccctccctgccgaaggcaacgccttcttcagcatcctcgcgtcagcagggggtttgtggacccctccagggacacctcctccccacgcctggctcctggaggcccctgggggaaaccaggctgcgggaagcaactaagcggactgtgaggaggctgagcactggctctagcttcctccaggagctgcgttctaattatttccttccatctcccccatcaggtccccaggggggcctgccaggcctgggaaggaagggaaagtgcatggtaagctgtgggcgggcttgagggatggggctcgccagctttgcctgggtcctaacctacttagccagggcagcagagccttggaccagcagaaaacacacttttttggctctgggttgggagggaagggttgggggagggagctggggagggaaacaggagccaccagtccaccctctaccaggccctggggtcaagcctctgcccgcagcccatgactgaggcacgcccttgcctgttggtgcctcggtttccccatctcaaccacaagcatgcactcattcctgcttgtcaggactcaaaggggctatgcacacccatccgtagcatacagtaggtgattagtaaatgcagacagttgggggaagcagtgggagctttgggggatgcagagttggaattctgctgtgtgaccctggacaggccacttaccactctctcattcccctgagcctcagttttcccatctgtcaaatggggatgcctgggcggggggttgggggggcgcattgtgaggattaaatgagatactgcatgctgagtttcttcctgggacacagcaagtgctcaattaacaggggttgtcaacagacccaccatccgcaaaggggcttgctttcataaaaaccaaaagcttaggctgtgtttctgagccaaatagttgtttctttcaaagcttcgtgtacaaagggaaatgtctactgcggaggggaccacctctgagcaccgcccctgccccagtaacccccctattccatgtagagaatgtgcaacatccatatcctgctagtctcacgcctccattagagaatccagcaattttcagccccagtcactctgggccacctccaccccaccaggctcacagagaaactgcctcaaggaatgtcttgctcccaagagcatccccaaggaatcagagcttcccctctcaaccagcagccataagggctatgcctaggggtgaccccaacatcccaccctacctatgagcattttggatgcaggagaaagtggcctgaggcagagcagccaggctaggaaggggtgtgctctgtgggactcacgttgttccgaggtgcgttgggctgcacagggtcctcggcggccagggcgatgctgctcatggcaatgaccatgaggatgcacatctcaaagtagcgcaggttcaggatgtaatggcacaggcggcgaaggctgttggagacagatgggcgtgcagaggtccactcagaccacaggctcacaaacccttttcttccataatctcatgttacctaccactactgagatctccaacccccaaggcctcctacacaacaaactattaaactcctccaggtgggggccctctctgggtcctggaaccccaagaaggcagaggggacctcggtgagagaagacattcacatgccctgtttagcaaagttcctatcactcccaaacgaccctcttgaagtatcttgatccccaagctaggttgaagaaatacggtccttaattctgtaggagataaaaaggcttttcgatattaaatgtcccagggccaaacaatattgtgaatctatgggttaagtagatttctttctttctttttaaaaattagctgtgtgaccttgggcaagttacttgtcccctctgtgccttggtgccctcatctgtaaaatagccgtaatactagtgcttacttcacaaaatcatgagacccaagacttaatttatgcctggctcatgataggggctccaaaaagttagttattgaaattatgaattgcaggccttatcagagccttgaatgtgccaatgggatgtgccagttaacctcttaataagtggagccaataataaatagttcataaggttgtgtgaatggcagcagagctgagtggttaagaacaaggaggctagagccagtgtctgggctcaaactccagctctcccactggcttgctgtgtgaccttgggcaggtgaattcacgtctctggacctcagttttttcatctgtcaaatggagctaagcatagtaacaacctcagagaaattaaaaaaaattttaaggcactcagaacagtgcctggcactgagtagataccacataagtgtttccttagtaaaatcgataagtcaactaaataaaaaagtactttaaaggtacttttatttattactacccagggtgagttgccaagaggcagattatagaaagcagcttctcccccatcttatctgacatgatccttcattgtcaagaagcattttgagcggtcaggctttcaagaaatatccctgggagacattcaattctaaaacaacctccgagccactacgacattcatgggataaatttctcccctaaatagtctatccatttcaaagatgcccaagacagaaggccatggaactcagacactatccgcccagaatctaaacccttacagagtctaggttagaaacagagttcaggtcctagggctgccacgtgcagttgttcaggctgtgtactgcacaaggcagccatttctaagggggtgcctcttacatcacagtgaagatttgtttatttatgacaaatttatttgttgtttaggacaaatttatttgtttatttatgacaaatttgtttatttattgtcataaataacaatgattttctagtggatggcaggacaggggtctcttccaacaaagtatattgtgacaaatcatcttacctgacttacggaaggagcatccattttcaacttgttcaaaggtatccctggactcatggtggtcaacactcactcattgccctctatctggcctgacttccgccaccctggtgggagccccaggccccccctgcccttgctgggggccatactcacgggttggtcgtggacaggatgaacatggagctatagggaggcattggcttagggccgtcttccccacggtcgtcttcctcctcctccttcttctcttcctctttttttggcagtgggtctgggttggcgtttttgttcactgttgggacaagaaccaacacagggctccctccacaatttcccacaagtctctgggaactcctgtgtactcccagggcaggcaagaagcggctgacatttctaaagtgcctgctgtatataccaggcatcttatgacatcactgaacccttgtatagccctgaggttgatatattctgatctcctgtttacagatgaggaaattgaggcacagagaagtaaagtgacttgtctaaggtcacacagcaggaagtggcagagctggcatttggaacccaggcggcctggcccccgagagcctgctctcaaccactctatagccttgagtgcggtggggccctcatgggatattaacacagacctgcccctatcctcgttggaccttcacaccctcacttgcaggcaggtagggagagtgccaagagacccactgaacagatagaaatactgagacctcccataaactgcatggcatgcccccattagcacccctctcttgactcagggggaggagccatcagcctctggagcttccattctgcagcccagcctgcttatgtgcccacgggcaggctgagcctctctgagcctcagtccctacatctataaaatgggcacagtgacaagaccttaggatcttaggtctcaggaccatggaaagcctttatccagcaaactcatgaaaatctctcacatagaactgacactagatgaacttaagacataatccacccagcagttcaccattttttttttttttttttttttttgagacagtctcgctttgtcacccaggctgcagtacagaggtgccatcttggctcactctacctcggcctcctgaagtactgggattacaggcatgagccagtacatctggccccttttttaatgtggcgactagagagtttaaactgacatttgcatgtggcctgtgttacatttcttttggacagtgctgggccgagagaatcaatcatctgaccccctcaagcttccatcagaggaccctattgctcctcaaatggggtggcttcctggctccccttgggaaggaaggacgtagaagatattgctaacccgactgaacacaaccccgtgccaggcactgtgcacaaattatctcactgaaccctccacagccctgtggggtaggaaactacgcctatgcccattttccaggggaggagactgaggccagagagatggggtcacagtccagggtcactcagcagagcctctggctccagggacgccaggtcccctgcccagtgatgtgagagcagagggtctcaccttgtacgacggtgtggttgagggggggtgggcaggctggggggatgtccactgtggtgtggtcgggtttcctggcagtcttagctgaattggtctgggtgccgctggggttggtgacgataaggctattctcgggggtcttgggggggccgggattggatgggttccccgggttgttgggcgtccggcggctggcggcgttctgggggttggtggccatggcagggatggccagcatggggccggggtcggtgctgtttcccatcttggctgggctctggggcaggccggcgtggccaaggctgccgtggggagcggccgactccgcggtggccagcttgttgttcttcatgttgtcaatatcctctgccaggggtgggtcttggcggcccaggtcctgctggattggccgggtggttgacaggttggggcccgacacagggaccccggagccctggttctctctgaggaaggcaagtgaatgaaaaagaaccaacaactgatttaggataaaaggcaacagttcaggatcctagctaagattccatctttcaagagtacaatttgggctgggcgcagtggctcacgcctgtaatcccagcactttgggaagcggaggcaggaggattgcttaaggccaggagttcaagaccagcttgggcaacatagtgagaccctatttctacaaaaaatgtgtaaattgacgggcgtggcgctgtgtgcctgtagttctagctacttgggaggccgaagtgggaggattgcttgagcctgggaggttgaggctgcagtgagccgtgatcgccccactgcactccagtctgggtgacagagtgagaccctgtcaccaaaaaaacaaaaaagaaaaggaaagggtacagtttggtcatggagaagtcatgtcccagatccctgcagtgcctggaattgagaggagcctgttcacttcttggtcagaggtcaagaccttcacgtgcccatggacaggtttccacaactccccatcatcttatttcttttctttctttctttcttttttcttgctctgtcgtacagtggcgtgatctcggctcactgcaacctctggctcccaggttcaagcgattctcttgcctcagcctcctgagtagctgggattacaggtgcccaccactacgaccggctaattttttgtatttcagtagagatggggtttcaccattttggccaggctggtctcgaattcctgacctcaagtgatccacccacctcagcctcccaaagtgctgagattacaggtgtgagccactgcacctggcctctttttttttttttttttcagacagggtcttactctgttgcccaggctggagagcagtggcaggatcatagcttactgcagccttgaacttctgggctccagtgatcctcccatctcagcctccaggtagctgaggctacaggctcacgccaccatgtctggctaattttacaattttttgtagagactggcgtctcactatgttgcccagggtggtctcaaactcctggcctcaagtgattcttcctcctcggcctcctaaaatgttgggattacaggcgtaaaccacaatgcccagcttgtttttaactttcttattcttagctgagttttcactgcctagtacagggcctctcacacagtcaatgctgggtaaacttactgtcaaatgataaatgaatacccccattttctttttctttctttctttttcttttttctttttttttttaactgagacagagcctcactctgttgcccaggctggagtgcagtggcaggatcttggctcactgcaacctctgcctcgtggattcaagtgatcctcgtgcctcagcctcccgaatagctgggattaccagcgtgcaccacaatacccagctagtttttctattttcagtagagacagggcttcgccatgttgcccaggctgcttgaactcgtggcctacagtgatccacccacctcagcctcccaaagtgctgggattataggcctccctaagtgctggatatatagagccaccgtgcctggccagaatgtccccattatccagatgaggatactgaggccccaggagagatcccacagcctcaaacctcccatcaacccctgcctctccaagccatggacacctgggccctgcctcttgccatctacaggtggacaaagactcacttagtagcccatctgatgccttctggactacagacccctggacaacacagccctggtttcccataaatctatctagaaagaataaataaataaataagtaataaataaaaggctggctttccccagagggcttcccactggctaaactaccagcaccattctcctcattttatttttgcattttaacttgcaaaaacccacggtgtttttagtaagtggaagagagacaagctaatttattttcagaccaaagtaggtaagtgggatgcttctatgaatacttcccggaaggagaaaccgaggcagttccactgtttctctgagactgcacaggggaaatagacaggtccaagcaactttctgccttctcagttttgtgagtgggtcatagagggacatttcagaagacaggctgacctgggtttgaatctcggcaatgtctttttttttttttttttttgagacagggtctcactctgtcgcccaggttgtagtgcagtggcgcgatctcagctcactgtaatcgccacctcccaggctcaggcaatcctcccacctcagccttcccagtagctgggacttcaggtgcctgccaccacgcctggctaactttttaatttttctttttgtagagatgaggtctcactatattgcccaggctggtctcaaactcctgggatcaagcgaccctcttgcctcagcctcccaaaatgctgggattataggcatgagccactacacacagggaaatctcagcaacatcactagctgtgcaaccctgtgtgatttgcttaacctctctgagccttagttcccacattttaaaatttgggataacaggagtagaaccttccccatatcctggagactgaagcaatgatcctggaccttctttaccacataatctccagtgagttacttagcctcagttcctgacccataacatgcgggccgtaacctcattgagtctggctctgagaactaagtatgttaatgagctgagagtcaccgaggattattctcaggccttgaaacctaatgggatttgtcttgctggatttagcacttgcttaggactggtgacctctttatcccttccaatttctcccttttgcaatgggaacgtctatcctatgcctgtcccgctgttatattctggaaacatacaaagatcacttgttctgtagtttctatattatatatataacatatatattatatatatttatcttatctatcttattttttgagatggagtcttgctctgtcacccaggctgaagtgtaatgcacgatctcggctcactgcaacctctgcctcccaggttcaagtgattctcctgcctcagcctccagagtagctgggactacaggcctgtgccaccacacccggctaatttttttttttttttctgtagttttagtagagacaggattttgccatgttggccaggctaaaactcctggcttcaagagatccattggccttggcctcccaaagtgttaggattacaggcgtgagccaccatttctggcctaaatgaggtaaattctaaaccaatatttcctcaacatcttggacagtccacaaagaaatccctaattctaacctgcttgtgatgctttttgagaagttgtgtatcatgaaaacctggctgagagtattttctcatcatctgtaatgtgtgtgtgtgtctgtgtgtgtctgtgtgtgtataataataataatatatttttaagagacagggtcttgctctgttgcccaggctgaagtgcagtggtatgaccatagctcactgcaacttttaactcctgggctcaagcgatcttcccaccctgggtagctgggattgcaggcacacactgccatgcctggttatttttattaatttttgtagagacagggtctcactatgttgttcaggctggtattgaactcctggggctcaagagatccacctgccttggccgcccaaagtgctgggattacaggtgtgagccaccacgcctggccctgtgtatgtatatgtgtatatatgtgtatatatatacatacacatatatatacacatttcagagagtgatatccctgccataaagcaggcccagttaagttataatttcaaagagaacctaaatcctttggccaccagctcaagaagccatggagaaactcgtggcggcattttcttagaggaataccatctaccaagagcagatggaaaagggtctgccaatgtgttttgtcttgtttttgcttccttgtagagcgtctgttggctctgtttgttgggaaattttaacaagctcagcctgcagaggcctaatatcaatttccgggaggtttcatttccaaagtgtctccaaggagaactcaaaaggggcagaaaactttgaagctgcacccctacccccttctccctggggatctggcatcctctgcctggaataggtggccagttgcataacacctgctgtgcgtggcgttcttgtgccagctgatcacttgggcatccttctgcagagggctgtggacaccttgcctggggcacactcagaccctgagatcggattatgtgggggtgataataacagcagttcctgtttattgcttatctcgtgtccccaccccctgtcctaaggacctcacgtattaactcatttaatccctgcaactaccaccatccgagatgggtatagtgatcagccccatttcacacaggaggagactgaggttcagagaggcaaagttacccagagttacccagctggaaaacagctgagctgggctctctggtgttcaaagctttaatggggcagcttggtacagtggcttacgcctgtaatcctagcactttgggaggctgaggaaggaagatcgcttgagcccaggagtttgagatcagtctggggaacatagtgagaccccatctctaaaaaaaaaaaaaaaaaaaaaaaattagctgggcgtagttgcacgagactgttgttccagttacttgggaggctgaggtgggaagatcatttgagtccaggagtttgaggctacagtgagctatgattgtgccactgcactccagcctgggtaacagagcaagactgtttttttttaaaaaaaccaacttgggcccattgggggtaccgtaagaattagagtgctaagtaattaaccactccctacccccatgcaggataaactgtggagctcaaaagtccagcatctctcttcctgttccttttggggagcaggttgtcatggtgacagatgcaggtggaattaggatgcgaacagcagagataagaattctagagtggagcaggtcttggcaaaagttccctttgcaagcagataggcctgggagaaggcactgcctggttgcaagggagaggcagaagctctgtcctccatagatttttactgacagtctgggaaagttccaccctcattttgtccaccctgcagggccactgggctcggccacctggtatgggggatctggggccagcagccattgaattatatgaaatagaatgtgcgtcagtccacttttcactggagtgagccactgaaagacagatgaaggtaggaatgaggagaagacaaagtgaataaaaaggaaaaaaatatgatcggcctggcaaggtagctcgctcctgtaatcccagcactttgggaggctgaggtgggaggatcgcttgaacccaggagttggagaccagccttggcaatgtggcaaaaccctgtgtctacaaaaaatacaaaagattagctaggcatggtcatgcacacctgtagtcccagctgctcgggaggctgaggtgggagaatcacctgagctcaggaagtcaaggctgcagtgagccatgattgtaccactgtactccggggcctggatgacaaagcgagaccatgtctcaaaaaaaaaaaattatcaatatgctggagaatgaaaaacacagggtacgtttgcaaaaagcctcaaggaatgactgaagaagaggaaaaatgtacaaggcagacctccgaaggccactggctttgtcacaacagagaacgaaaatgtctttttattattttatattctcaaataaagttttatctttgccactttttttaaagcagatgaatgactgatcttgaatttttttctcttaaagtgcatgaatcttcatgaacttttatttccaaagagccttagaacctctttatcagccaaatgaataatgtctctcccggccagattgtttgatgtgtctattaataatggaattagcagtactcccctggttcagaatgggggtctggccagctgaggctatgggggtgaaagtggggagatagtttcttcctctgaagaagagagggagcaggaaccatctgtgggatttgggcaagctgggtccttattgctttttatgtttattgatgagagtattactaacagtattagctgacacttcctgagtgcttactattactgctaaaaatagcattcattgagtacttaataatattcatattaataatagctaacatggccaggcatggtgtctcatgtctgtaaatccagcactttgggaggccaaagtgggagaatttcttgaggccaggagtttgacaccagcctgggcaacatagtgagaccccaaaatgctacaaaaaattgctaacatttattgagctcttggtataagccaggaaccactcaaagcattttacacgtactaactcagttaaatcttttttttttttttttttttttttgagatggagtctcgctctgtctccccggctggagtgcagtggtgcgatctcggctcactgcaagctccgcctcccgggttttacaccattctcctacctcagcctcccgagtagctgggactacaggcgtgcaccacctacgcccggctaattttttttttttttggtatttttagtagagatggggtttcaccatattagccaggatggtcttgaactcatgaccttgtgatccgctcacctcggcctcccaaagtgctgggattacaggcatgagccaccgcgcccggctcagttaaatcttatacccagagaaggaggtagctactattcttatcttcattttatagatgaggaaatggaggcccagagaggagtgaaattctgaaagtcacacagcctggaagtgatagggcaggaatgtgactgcctgccccaaagtccttgcctttcacaaccaggctttgctgctcttgtagtttccaatgtttactgttgtctttcaaaaactcttcctggcatattgttagggagagacattttgtccctgtcactctgcctccttcaataacagtagatctgttaataaggctgataataacagtaatattagtaataatagcaagagtaattaataatcattggtctttcttttttttttagacatgaggtcttgctcatctctaaaatgagcaatgctactgcaatccaacctgggcaacagagcaagaccctgcctcaaaaaaaaaaaaaaaacaaacaaaaccctaaataaaccaacaaactaaaggcacagataattataagcaagatttttcacctgtgtgaggagcactagaaagtcatgaagaggaaaggataattcttttccatatgagactgtcttgtacatggtagggtatttagtatactggcctcccattctctaaatgctcaggctggtctcgaactcctgggctcaagcaatcctttgcctcagcctcctgagtagctgggattacaggtgcataccactgtacctggctttttttttttttttttttttttgagacagagtcttgttctgttgcccaggctggagtgcagtggtgtgatctcagctcactgtaacctctgcctcgcaggacaattcttgtgcctcagcctcctgagtagctgggattataggcgtccaccaccacgcctggctaattttttgtatttttagtagagacagggttttgccatgttggccaagctggttctgaacccctgacctcaggtgatccacctgtctctgcctcccaaagtgctgggattacaggcgtgaaccatcacactggcctgtacctggctcttcattggtctttactatacagagagtgctgtggtaaacactttattccacctaaactcccgttttgatctctcattcccctgagtgactgacagccccagagtctcatcaatgcaccttcaatttctttgtcactttctcgtcactagtcatgtcctgcaaactggcctccttctggtccaccccagggcctttgcacatgctgttgttagactgaaacactctactcccttctcagattgctcctctggaaacctgccctgagaccctgggagcagtttcttggtcgtatttctcagaatgtctcagaccacttcacttgcagttgtgtgactgaactcacagcatgagcttagaatatagtaggcacttagtaaatactaactgaatgaatgcataaacccataggagaagattgaagcgaaagaatgacctagaacaatggttttcagaaaactgttgtagaactacgtggaaacctaataacataatgattgaggggcactgcaggcacttagagaatggtaggcagttatactaaataccctaccatgtacatgacagtcccatatgggaaagacttatcttttcctcttcatgactttctaatgtccctcaaagaggtgaaaaatcttgcttgtaattacctgtgcttttagtttgcttgtttgtttgggttttttctttctttctttcttttttttttttttgagacaaggacttgttctgttgcccaggttggaatgcaatggcataatcatagctcactgtaatcttgaactcctgggctcaagcaatcctcctgcttcagccttccaagtagctagaactacaggcacctgccgccacacctggctaattaaaaaacttcttttgtagagatcgaggtctccttatgtcgcccaggttggtctcgaactcctggcctcaagcgattctccttcctcagcctcccaatgcactgggattacaggtgggagccactgcacctgatcctgtgcttttagtttaaacctaactcttttacataagaacacaacatattttttgtatgtttttaatatacattgcattttcctgcaatgcaactattaaataaatggaagaaagactagactcttttgtatatggaactttgccaagaggtgttcaacattgtggaacatcttgacactgctggcaactcccctcatgtggtttgaattgtccacacaacccagagttagccatcatttgtgcctgtcacttcatggtgattttgtgtatggtgtacatatcagaattacttcactatgtcctccagagtctcattactcaaaatgtggtccctggaccagtagtatcagcctcatctgggagctcgttgcaaatgcagaatctcaggctccactgagtccttagccctacggaattacaatttgtgttttaacaagatccctggggattcacatacacattagattttgagaagtgctggcctacctcatatgtcatacaacaggatcacttaaacccatcattaaaaaaatcaatattatgccctgatggtaatataaaagaggactaagagcaggttaatttgtaataggacaatgtctacgatgtctattttaatgggtaagttgttgagtccctatatgcagaatcactatagcatctgctagaaagtattacaaaatgtcgttatgaaaaagaggatgctggttctgaatggataagttgctggcctggaagatgcctcaaaagctttctaacatttttatttatttttaaaaggtgaggtctcactatgttgcgcaggctggtcttgaactccggggctcaagtggatcctcccaccttggcctcccaaagtgctgggactacaggcatgagccaccacatcccgctgcatccaaagctttgaaactctgctctcccttcaattctaacggcccaaagtgccttttctttttctttattttttattttattttttgagacaaagccttgctctgtcgcccaggctgaagtgcagtggtgcaatcatagctcatcatagcctagacatcctgggctccagtgaccctcctgcctcagcctcccaagtagttgggactgcaggtgcatgccaccacatctgtttaattttttatattttatagagatggggtctgcctctattgcccagactggtctccaactcctggtatcaagtgatcctcccaccttggcctcccaacagagtggcttttcaaacttccaaagaatagcattaggtaaatagagttggctgaaaatggccaaaaatgctctaaatttaccgagcacttattatgtgtcagctgctcttccaggccctttgcatacattacctcattcaatcctggcaatgacccaattagatcccactatttccattgtgtgaggcccagagatatgaagtcactttgcaaaagtcacacagcaagaacacagaagactatataattctggacgacagtggggcttctcttaatagtttccctgaaatgctcaaggcctctggtgccagagagcctgggttcaaggacactggttagaggaatgaccttgaggagctcactcaatctctcagtttccccatctgtgaagcctctaatccgaacactttgggagactgaggtgggatgattgcttgaggccaggagttggggaccagcctgggcaacagagccaggcctcatttctactaaaggtaaaaaaattaggctgagtgtggtggctcaaccctgtagtcccagcactttagggaggctaaggcaggcggaatgcttgagttcaggagtttgagaccagcctgggaaacacagtgaaaccctgtctctacaaaacactgtctctacaaaaattagccaggcatgtggcacatgtctgtggtcccagctacttgtgaggctgaggcggatggcttgagcccgggaggtagaggctgcactgagctatgactgccactgcactccagcctgggcaacaggcgagaccctgtgtcaaaaaaacaaaaacatacagcatttttttttttttgagacagagtcttgctctgttgcccaggctggagtgtgatggcacgatctcagctcactgcaacctacctccacctcccaggttcaactgattctcccgcctcagcctcctgagtagtgggaatacaggtgggcaccaccactaatttttgtatttttagtagagacggggtttcactatgttggccagcctgttctccaactcctgacctcaagtgatccgcccgcctcggcctctcaaagtgctgggattacaggcatgagccactgctcctggccaaatacagcactttttttttttttttgagacagagtctcactctgtcgcccaggctggagtgcggtggtgtgatctcggctcattgcaacctccgccccctgttttcaggcgattctcctgcctcagcctcctgagtagctggggctacaggcgcctgccaccgtgcccggctaatttttgtatttttattagaggtggggtttcaccatcttggccaggctggtcttgaactcctgacctcgtgatccatccgcctcggcctcccaaagtgctgggattacaggcgtgagccactgcgcctggccaaatacagcattttataatatatttttataaacaaatacacagcacgtgctactttggctgttgtcattattaatgttaccgtcattctgcggattcgaggtcacctccacttacttcctcctccgatgcctccgctccttgtcctccctccgcgcgtccccctcgtacgtggctggagcgccatgccggtgccttctcctgcgctcgcccccgtcggggccctcgccctcgccctcgccgccccgggccggccggctgccctcgcggtgccgcgccctccgctccgccttgtcctccggaccctcctccccgggcctgcggtgcgcgcgatgacgtcgatgctccccgtccgcgcccgtgcgcggggacccgctgcggctctccctgctgcccccctgccggtgcacgtgcctccggtgggggtccccggccttgcctcgctcggcctcgccctcccagaacccgggttgctccaggctgccctcccgggcgtggtggtccgactcgcggccgtagggtccctcccggctcagctcggcctcctggcttcccgcccagggcctccgtgcgtccaggcccgccgagccgctggggtcccgggcccgatcgtggtagcgggcctgtttcctgaggaagtcctcggcgcgctgctggccgaggcgctggtccacggtgggctcggccgcccggctcttgttggtgttgttgttgcggttctcctgcgggtccaccaccagcggccggtccaagtgcgtcttcatgtctggccgcaggtgccgcgtgtaggcagccttccagcgctcgtccgggtccatttcgttatacagggcctcccggctggccagcaagttctgctttcgcatctcactggtccgctgctcccacacggacttggctggcttttgattcttctgttgctctttcctgcagtggcatggtcacaggacttagagcattgctaggcactgtagcttggatggatgacccaggcgaaccaacccacatctcagcctcccactcctgctctccaccctctactccccactgaatgctaggagtctgtgagcatctgagtcaggtcccagcctcctctgctcaagaaccctccatggctcccacctggctaggggcaaaagcccaagtcctcccccctgacccagaaggccctgtgtaatctgcttgtcacctccttgccttcacctcctcacacttactattcgattctagtcacacaggcctccttcacatcaggcatgttcctgcctcagggccattgcctatgctgttccctctgcctgggatgcccttccccaggccccccagtggctcctccctcacctccttcaggccatgtaaccttctaggtgagcagtccccaacctttttggcaccaggggccagttttgtggaagacagtttttccacagacctaggtgtggggggtggttttgggatgaaactgtttcacctgagatcatcaggcattcgattcttaaaaggagcacgcaacctagatccctcagatgcaccgttcacaatagtgtttgtgttcctatgagaatctaatgctgcctgctgatctgacggcaggtggagctcaggcggtaatgcttgcttgctcactgttcacctcctgctgtgcagccccgttcctaataggcctcggcctggtaccagtccacagccccgggactggggacccctattctaggtgatgccttccctgacaacttcgtttaaaatcacaactctcttcactcccagcatttgctatttccctcccctactttctctgtagttccatcgccttctaacacaatatataatttacttatttatctaatttattgactccttcccttgctagaatggctacacacaggtgggattttttttttcctccttgttaatgctgtatccccagaagttagaacagtgctgggtacataacagctgctaaccaaatatttattgagtgaaagtgggtggaaggacaagaagtgtctcttcctaaagctcagttctgtcaaggaccacccccactgcttcccaaatctgtgcctgggatagtgtggacgttcaggagccagggtagcatcccagggattaggggcacttacacagctatagacatgttggccgcggacagaggactcacttctgccacctccttggctttctgtagggcaagtttctggttcgctgcttcttcttcctcttgctcgtcctaaaaggcacgtggaatctttgttcacaaaacatgaactaggccttggggactcacttctgaccctgttgctgaccaggggcaacatttgaaatatttcgaccaatcagaaccaaggctccccaattggaatgggtacctgctattggttaagtgtattgctatcccctctgtgtataagtttgacatctaactcattatgaagcctattttaacacacagccagataacaaaaaataaaaatgtcccttctcttcctacaatgaagactttcctgcagcctatttttttttcttttgtttgttttcagagacagagtctcccttggttgcccagcctggagtgcagtggcacaatcatagctcactgtaaccttgaactcctgggctcaagcaatcctcccacctcagcctcccaagcaactgggactacaggtgcatgccactatgcctgtatacatttaattttttttttttttttgtagagacagggtctcactatgttgcccaggctggtcttgaacttctggcctcaaatgatcctcccatttcggcctcccaaagtgctgggattccaggcatgtgccaccatgcctggcccctgcatcctgtcttaatgagctggaaagcagtgcaaagattttcctctcactaggctttctgagccatgtgaactctctgaaccaactttcaaaaaacaccaactaccctcacacacagaagagcctggcatccgatggcccctgccatgcactgtcaacagcccccagaaggagaatgaggagaggaatttatattcccagcccccatgacaggaaggcggtggggagaggagagcagggcacttgggctacagccaactgcccagggtgctgctgctcactggtggttaggttcagagaggaggagaatgggggaagaggttttaaaaatacatacagaaaaagacgtttttggactttaaatccttcttcagccttcatgcagggcctcattcgtaaaacagaaaagccaacaaagaaaaagcaaagaaaaggcaacgagaaagaaatggccagaaatgaacccgcccataagaaaagtcatgccattgcaggcagctctcccgctgtgctccgaatcactggaacggggagcaaccttaccaccttggaaatggtcagatcaggacactgtcagagacaacatggagatgggatctggctggccaccctgctctcatagggccacccccacccctcctggcaccattcccagcatttttcagagctaggtctctggaccatctgcctcagaaacacctaaaatgcagatcctcaggctccccaaataatctatagaaccagtgctgggccctggaatctgcatttcccacaggttcccaagtgagcataaaacatgcccaaattcaagcaactggtacacagcagttaagagcacaagctgcagacccagacggcctgggttcaaatcccagctccacaacttactgctgtgtggccttgggcaagtctctcaacctctctgtgcgacacacatctcatctaaaattccaactctccctgactttccctactgaatttttctctgttgtgtttatcaccaactgacaagctacgtatgtttacaaatttatcttgtttcttgtctgtctcccctcttgaatccctgctccacggaggcagggatttttgcctttttttgttcactgcttaatccctaagtcctagaccagggccttggtcacacagtaggtgctcattaagtgcttactgaatgatgaaatctgtaaaatggggctcagagaacttggctcctaaggtttccatgaggactgaataggattaaaaacacgtattaaatgaccaagaaatgcttgtaggatcaatgaaagaaagaatgtggatctggagaggaatgtccacacctcccaggagataaacgaactggcctttctccctccccttctgctaccctcctgcaccagcccctaaggatggactcttggaacttggatgagctcatggctggatcagccctcggctcagccatgccagccagctccacagtggccaggcttgtggccgtgtgcttgggatggcagagacttccgcttccctccactgggagctggggccgggaaactctctctccctcctgccagggccggcagatggagcgttggcaacgtctgcttggtttggttcaatttcacaaacatgtcctgaatacctcgaggcactggaggtggggctgcaatgctgagggagaccccagggctgagaggaagaccctgtacctgttacatgtaatcttaacttaatagggtccttggggagaggcttaggctggacggaggctagctcttaacatgctgcgtttggctaaggggaggctccagcgggaagccagaggaagagagaaggtggggacatttattggccactccatctgtgccttgccatggttctgggttctctaaggtcccagggctggtggcagccctttttccttggccccagctctgactgggtccccataacagcactccctctcccatccactagcctgggggctacaccattccttggaaaccctgcttactccctgtaaacggccttttggttgagtttgccatccgtttcctgcagcgacctcactgccttcccccttcccaccctcttggctgtagaatttgcttgatgagggacagtctgtttctgggagtggggggagaggcgccttctctttgcatggtgcatccccggcaaaagttctaaccctgttcccatgcccccacccccacccccacccccacccccacccccgtcctgatctgccatgggcaggtggtaactttgccagagaaacattctcccaccgcctccaccttggtgagctcctgggcgttggccagattgtccacagcgatggccaagaacacattcaggagggtgtctgcaaatgtctgagtcaggaaaagcaaccactggtgggacaccacttgggccctgggtatctgggtctctcagtaccctcccttgagcccctgcaacctctcctctgccagaggtccaggcctgtccccttctctctctccatgaaggatacagttcccaaagagcgtcagtacaatgaaatagatggagaacaccatgccgccctgcacgcccccctgagacttgatcccgtcgtacatgacctcgttccagtcttcgcccgtcaggatctgaaaggggaggaagaaacacacagccaacccccctctcagccacgggccccttggagatgcagctgtggagccggaatccgcccaccccatccccgagcccaggaggtctttaacaatcctgcccggtttgcagagccagactccgtgttggcttctccttggcttttctctttgtttgcgagtagaaagggccgttcctgcgtcgtggggctcttagcctggcttctaggaaaatgggaccctggaggagtcacagaccctcctgtaactctgtcttacttgatgtgattaaggggatttgttatggactaaattgtgcccgcctccaaattcatgagttgaagccctaacctatgatgggatggtatttggagatggggcctttaagaggtaactagggttagatgaggtcatgggggacttcatgatggtattagtgcccttataagaacaggaagagaccgcatgccatggctcatgcctgtaatcccagcactttgggaggccaaggtgggaggatcacttgagcccaggagttcaagattagcctgggcaatatagcaagaccccatctttacaaaaaatttaaaaaaattagctggtgcccatctgtagtcccagctactcaaggggctgaggtgggaggatcgtttgaacctaggagtttgaggctgcagtgagctatgattgtgccactgcactccaggctgggtgacaaaaaaatgtgatttgcctaaaaaaaaaatagatttttttttgagatttttgtctcaaaaaaaaaaaaaaaaaaagaacaggaagaaacatcacaactctctctctctctctttgacatatgaggacacagcaagaaggtggctatctgcaagctaggaagagggccctcaccaggaactaactaaccctgctaacactttgatcttggacttcccggcctccagaactatgagagaataaatgtttcctgtataagccacccagtgtgtggtattttgttatggctgcctgagcagactaagacaggattttaatatttacctgtgttcctcatgtggtcatggtgatgattaaacaagctactacgtggatagcacaaatgtagcacaaggacacgtttggggtccccctgcctgaggcagaccctggaacaagggttcgggtgcaagtggtttgtctgggaggtgatctcaggaagcaccagtaggggagaggagaagtgagaaaagggaaaagagggtggaacgtaaacagtatgtgatcaagcgagtttccactgtaggtaaccggggcttggtcttgctggggagctctaggggtcatcccacctgagggtgagggagctggggtatttatccaccaacggctgctccttttaaggtgtggcacaaaaaattcacagtactgctggactgcagttccttgggggcagagcaggggaccagagaaagaccaaggcaaaggattaggtgttgacagacgcaagttgtgctgatgcatactgaaagaaccaaggggatattcaaacagcacctacatgctcctttaaaaaagatccaacttccttccttctatccatatccccatgaggataaagtaaatgttaaagaactccaaaaacatgaatctgctaaaacagggtttctaagcctcagcactgctgatatttggggccagattattctatttggggctgtcctgtgcattgtaggatattgagcagcattcctagtctccacccaccagatgccagtagcaccctctccctagctgtgacaaccaacaatgcttgcagacattgctacatgtccttggaggacagacttgtccttgggtgagaacctctgagctaaagatacatgactagcgatcagtgctattaataatcgcttatgggccaggtgtggtggctcatgcctgtaatcccagcactttgggaggccgaggcaggcagatcacgaggccaggagttcgagaccagcctggccaacatagtgaaaccctgtctctactaaaaatacaaaaattagccaggcatggtagtatgcacctgtagtctcagctactcgggaggctgaggcaggagaatcgcttgaacccaggaggcagaggttgtagtgagccaagaacgtgccgtcgcactccagcctgggcaacagagcgagactccatctcaaaaaaaaaaaaaaaatcgcttatgtgggggctcagaacttcccttcatggaaggtttcctcttcaactccctgtcttggggtctcatttagaaactacctccccaggagaaggagagagtgaagtcacattttctatacactctcagtccctcaaagagaaagaatccaccaaagatgctctgaaggtcccggctgggccagtcccaagcctcagggaatgcgcccacatgggtgcagaagttgctttgggttgatcaccctggaatatgagaccaaggtatcttcagatttgatgggtgtattagccattttttttctctgccttttttttaagagacagggccttgctctgtggtgcaggctggagctcacggcagccttgaactcctgggctcaagcaatcctcccgccttggtctcccaaagtgctgagattacaggcatgaaccacctcattggcctggccacgcattttattttctttattctgatgcatctggggtcttgctgactctggagggactgcccggtccagcactagccagtccctagaggtagtaaacaatttagccctgagcaggctttttaaaagcaaaccaaacaatatcccaaccagcccatatcccaaccacctcctttatcttcccagcactatccacctgccctaatcaccccaaggccaggtcctagacaagtaggaacagctcctctgccccagagcccactgaaatgatccaaactagccagtctcgagctgtttactctgcctcacccattccgtcccatggaaaccacaatcaagcctcttgcccacattttccttctcttcctgcttgaccctgttgcttctctgcttggtcctgcatggtgtgctccttctctgaggatctgtgagtataacaaactttcttttcgtttttgagacagggctttgctctctcgcccaggctggagtatagtggtgtgattgtagcttactgcagcctcaacctcctgggctcaagcaatccttccacttcagctgccctagtagctaggaggtatgtatcaccatgcccagctaattattattattatttttttgcagagacggagtctcactatgttgcccagacttgtctcaaactcctggcctcaagtagtcctcccatcttgacctcccaaagtggttttttttttctttttcttttttgagatggagtctcactctgttgcccaggctggagtgcagtggcgcgatcttggctcactgcaacctctgcctcccaggttcaagcaattcttgtgcctcatctcccgagtagctgggattacaggcatgtgctaccacgcccggctaatttttgtatttttagtagagatggggtttcaccatgttggccaggctggtctcgaattcctgatctcaagtgatccgcccacctgggcttcccaaagcgttgggattacaggtgtgagccaccgtacctggccaaagtgctgggattatgggtgtgagccaccgtgcccagccacaaactatctttccaatgacattcatctcctgatctgttggcctcaccataattgaataatgataaccataaaatctgtgtttcaaagtggtgtgaaaaggccaggtagagaaggaggagttcagggaagccccttggatgtggagcaggcactttcatctgtgacactgagaggtgttggcccgtggggccaggtggaggctgtacctgaaacaccgtcattattgctgctggaaaagtatcgaagttggtgggaggagtcccttcatcgaaattaaacctgcagggaggacacagacatttcacgttggccccacccggggtgctctgagggtgtggctcagtatctcatctccaaggaaacgaacgtctccatcatctctgtccccaggaaaccctgagtggtacccagggccctgcccatttgggtgaccgcaatgggtgtctgggctacgaggaaggcagcctgcacggtggaggggactgtgtgttccctgagcctgaccccagggaaccaggagttggaattcctgtgaaggacttactggccgccgaagagttgcattcccaaaagggcgaagacgacaatgaacaggaaaaggagaaacaacaggctgatgatggacttcatggagttgaggagagagacgaccaggtttctgagagatgcccagtacctgccgacagaggccaggcgaggactcaggccaggcgggggaggcagggccccggagtcagccctcgaaacacgaggctcactttcccaactttctggaggcggccccaccatgtcccccatccccaccccctgtacaaatgtccaggaaccccaaagacttactttgtgactttgaaaatacgcaataacctgagggctcgtaacacgctgattccaaaggatgtgccaggttttatgacagcccagatgacctcgaagatgctcccaatgataacctagggcagagaacctggtctcatgtccagggacagtgtctgggctccagaactggcaagcatttcctaggtaccaaccttgcaagaactcaaccaaactcctccctccaaatggaagccgggtgaggatccttgaccccctcattcatccattcatttatctatagagaccgggtctcactgtgtcacccaggctggagtgcagtggcgcaatcatagctcactgcagcactgtcctcctgggcttaagtgatcctcccacctcagcctcttgagtagctgggattacaggtgtgccccaccacatctggctaattttaaaacatttttatagagatagtgtctcgctagtattgcccaggctggcctcaaacttctgggctgaagccatcctcctgctttggtctctccaactgttggcctccactttccaaagcattgagccactgcacccggcctcttatttatttatttatttttatttattcatttattttgagatggagtcttgctcttatcacccaggctggtgtgcagtggcgcgatctcagcttactgcaacctccgcctcccaggttcaagcgattctcctgcctcagcctcccaagtaactgggattacaggcacccgccaccacgcccggctaattttttgtatttttagtagagacggggtttcactgtgttggccaggctagtctcgaactcctgacctcgtgatccgcctgcctcggcctcccaaagtgctgggattacaggcgtgagccaccacacctggcctcttttttatttattaagagctcccacaggcctgagaattcctgaaacacataattacaaagtgaatgtcatgcaactactacctatgtcaacaattaggagaaggctagggcagtggctcatgcctgtaattctggaactttgggaggccgaggtgggcagatcacttgagcccaggagttcaagaccagcctgggtaacacagggaaaccctgactttacaaaaaaaaaaaaaattagtcaagcatggtggcatgtgcctatagtcccagctacttaggaggctgaggagggaggatagcttgagcctaggaatttgagacaggagagggtcatgatcctgccactgcactctagcctgggcaacagagcaagaccctatctcaaataaaataaaaaataaaataaaataaaaagggacatgtggataccctggaagtttccagagacactgtgatataactaccatcctgaattttgtaataaccattttcttaccttaaaaaaaactgaggtgaaattcacataacataaaattcacactttgaattacacaattcagtgcctttaggtacatgcacaatattctgcaactatcacctctatcaagttccaaaacattttcatcacccccaaaggaggccctgtccccatgagcagttactccccactctccctcacccagaccctagcaaccactaatctactttctgtctctatggatttgcctgctctggacatttcatacaaatggaattatgcaatacttgaccttttgtgtttggtttcttttaccgagcgttgtgttttcaaggtcctcgcctttttaacgtattcaagtatcatccttaaaaaatacagtttaaggcggggcgtggtggctcacgcttgtaatcccagcactttgggaggccagggcaggtggatcacctgagatcaggatttcgagaccagcctgggcaaattgctgaatcccggtctctacaaaaaatacaaaattagccgggggtggtggtgcatgcctctaatcccagctacttgggaggctgaggcgggagaatggcttgaacccgggaggtggaggttgtagtgagccaagattgcgccactgcactccagcctgggcaatagagtgagactctgtctcaaaaaaaaaaaaaaaaaaaaaaaaaaaaaaaaaaaatatatatatatatatatatatatgtagagagagagagagagtttaattttgtccacttgaactttgcatgaactgtatggacttacgttgctagctcctgcctccttctgtgccatgttacatgggtgagattcattcctgttgttgggcatgtggctgctgttggtggactttgattgtcacagagtatttcattatatagatatgccacaaaatatttatctgttctacagcaaagggatacacggatattgagacttggaactattacaaacaaggttgctcaggacattttaaaatttttctttttttttttttgagacggagtctcattctgtcacccaggctggagtgcagtggtgcaatctcagcttactgcaacctctgcctccccagttcaagtgattctccttcctcagcctcccaagtagctgggattacaggcatgtgccacgacgcctggctaatttttgtatttttttagtatagacggggtttcgccatgttggccaggctggtcttgaactcctgacttcaggtgatccacctgcctccgcctctcaaagtgctgggattataggtgtgagccactgtgcctggcctacttttatttcttagagatggggtctcactctcttgtccaggctggagggcagtggtgtgatcatagctcactgcagcctcaaactgctgggctcaagcaatcctcccaccttagccttctgagtagctggggctacaggtgtgcaccaccacacctggctaattattattaatttttgtagagacagggtcttgctatgttgcctgggctggttttcaactcctgggctcaagcaattctgctgcctcagcctcctgaatagctgaggctataggcatgaggcatcacacccggctttcttttctttttaatggaaagaaattggttttattctttaactacttgggtcatttatgtagggaaggtttgcttgtttgtatgtattttgttttctccaacaacataattttctataatggcagaaaacagtacaacattcagttattataaattattaagctggctgggtgtggtggctcacgcctgtaatcccagcactttgggaggccaaggcgggtggatcacgaggtcaggagatcaagaccatcctggctaacacggtgaaaccccatctctactaaaaatacaaaaaattagccaggtatgatggcgggcacctgtagtcccagctactcgggaggctgaggcaggagaatggagtgaacctgggaggcggagcttgcagtgagccgagatggcgccaccgcactccagcctgggtgacagaacgagactccatctcaaaaacaaaaaataaaaacaaaaaataaaaaaaaataaataaattattaagcctttctgagaccaacaggactatggtaaatgattagggctgccctgggccaggcattctccacttatttgcgaacaaccttaatttcacttccagctgcagggacattctggcctgtgtctcctaggtatctgggtgagattttctaggatgaattcctagcaatggaatgctgggtcatatctccatcttgtagtttttgccctggttcgatgagaaggattggacgtagattattctccaggacttaggttttgtgtggactagtgggttactgggtgttaatcacatttaaaaaataaattaattaactgagtaattcacaaaataacaaaggaccataatggctccataatgccagggtgttgtaatctaacaattatacttcatctacctccacatgactgagctacaaaggaaaagaagaaatagaaatcatattgatgtcctgtttgtaatcctgaagttgggtacttagttggagcgacacaggcaacccacctaaggcatggcttttctcccaacttggaaaacttgtcttatgtcccccacttagctttccaaagggggtctatacgttttcctcccactggcggtggttgagggttctgggtacactgtatccttgccagtgtttgggattgttttctcattccttctgcatccatctgagtctctcatattcaggggtgactttacctttctccctttaatgtgtccaggtatctgtcattccaggcaagagctggagaaatgaactcttagaaacaagagcacttaccccacagtcaaagcagttgaaggaagagtggaagtaaggccgcgtcccaagcccgtacatttttataaacatttcggacataaagagtcctaagaaaatgaattctgcatagtctagaagggagaaggaggaaacagagaggaggttaggcttgctgagggtaggggttccaggtggctctgactttccttttattatcatttttaaactttttattttttgtagagatgaggtcttgctatgctgttaggctggtttcaaactcctggcctcaaacagtttccctgatttggcctccaacatgctagaactacaggcatgtgtcaccacacccaacttctgacttatcttttttctttttaaaatttttatgtggagatgggggtctcactatgttgccctggctggtcttgaactcctggcctcaagtgatcctcccagcacagcctcccaaagtgctgggattatatacatgacccactgtggccacgccctgtccaaggtgtccttcccatgggcctcagtttcccctctgttaaaaaggaagagctggctgggcatggtggctcacgtctgtaatcccagcactttgggaggcctaggcggtcagatcaactgaggtcaggagtttgagaccagcctggctaacatggcaaaccccgcctctactaaaaatacaaaaattagccagtgtggtgacacatgcctgtaaacccagctacttgggaggctgaggcatgagaatcacttaaacctgggaggtggaggttgcagtgagccaagattgggccaccctactgtagcctgggtgacagagcaagaccttgtctaaaaaaaaaaaaaaaaaaaaaaagcaacaattatgccctaccctccaaccaacaagctaaccaaccttaggccgattttaaaaggaatgagaaaaatatcagtgggtctccatcttgtagtttttgccctggttcgatgagaaggatcggatatagattattgccaaggacttttgtgttgactggtgggttcctgggtgtttatcacatttaaaaaataaactaattaactgaataattcacataataacaatggaccataacggccccataatgccagggtgctgtgatctaacaattatatttaatctacttctacgtgactgagctccaaaggataaaaggaaatagaaatcataatgatatcctatttgtaatcctgaagttaagtacttagttggagcgacacaggcaacccacctaaggtatggcttttctcctaactcagaaaacttgtcttatgtcccctagaaatcctgtgttgtgagtgacctaaaaagtcttgagtaagacaaagccttttgttctttgatgagcaagcataaaattgcaaatgcctcagggaggggtaaaacatggatatgcatttgctccagcaaataaatggctgacatcagatccttttctgagagggctttcttggtagggtaggaagatgaggagttaggaagggcgtgggtacttaatggatagaaaggagagatgaggagggtttctgaggagcagaaagcatacagaaaggaaagagacagaggactgaaactaacttccatgaatttcatatagctaattaaggccacaaagctaattgtgtttggtggttgtgatggtttaaatgtttgtgtcccctccaaaattcacgttgaaacttaattgccaatgtaacagtattaagaggtggggccttcaggaggtgattaagtcattacggtagagctctcatgaatgggattaggtgcccttataaaagaggttgacagaggaagtttgtccctcttgctcctccaccttctgccatgtaaggacccagtgttcctcccttccagaggatacagtgttcaaggtgcaatcttggaagcagagagtagctttcgccagacagggaaacctgccaatgccttgatcttgggcttcccagcctccagaactgtgagaaaataaatttctgttcttatcaaattacccagtctcgggtaatttgttatagcagtacaaatgaactaagatatttgccaagggtgtttgctatgtcatgcttttaagaggtgttttgaactgaccgtcaaagtccttcacagtatttatcaccaaaatttctccttatttataggacgctaaggagatcttagtgtctgaggggaactctagggttcctaggaccaaaatatcagcagaggaagtctgtttgtaacatctgacacattcctagacccaccagaagtaactctgggaggactgaagagtttctgagatcttgttcctcagttaccatggaaacatgatagcaggtgatgcacaagacttgaaagaattacttatccttagcattgttgcatctggaagaactttcaggaccatcaaatccggtttctaccacatagatgtggagtctgagatccagagaaacaactacacttcactgatgccaagatatacatttttgtttatattttgacatctctgaaattaatgtgtatctttttttttttttttttttttttgagatggcgtctagctctgttgcccaggctagagtgcagtggcatgatctgggctcactgcaacctctgcctcccaggttcaagcgattctcctgcctcagcctcccaagtagctgggattacaggcgcccgccatcatgccaagctaatgtgtgatcctgggcaatctacttaacctctctgtgtctcagttttctcaaagggaaagtgggaatgagtaaaggacctttatagacactgaggacccaggcaggaagtctcagtcccttgttcctgaaccaggacagactgtacaagatgattagtagagagaatataggagattaaaaatagagtattagaggaagttaaaacacgaagtagagtcctcatttataagagactccagagggactaaaaacaattactaagtttgaaactaggtcagggccctgggaaggagaactggttcctgaggggtgtcctggggggtcagccaacgtgactgggaacaaggagggttataagaagacaatggcctggactaggctcacgggcctttctaggtcaaagactagactgtctcttcttgctgtcctaagtcaattctgaaccaggtcagaaggtcagtgaataaattagacagccagtaggcaaaagacgttttgagaagtccttacttggggcctgtgagccaaagccagggcatccacctgcccccctcactgcccaatcactactctttattttattttattttattttactttattttttgagacagacactctctctgttgctcaggctggagtgcagtggcatgatcttggctcactgcaacctctgcctcctggattcaagcagttctagtgcctcagcctcctgagtagctgggattacaggtgtgcaccatcacatctggctaatttttgtattttttgtaaagacagggtttcaccatattggccaggctggtcttgaactcctggcctcaagtgatccacccacctcagcctcccaaaatgctgggattacaggtgtgagccaccatgcctggccccagtcgctgctcttgttgattcctcgagctctttactttttaaatcctgctcagacatctccccatcttttgctgcttttcctcaccctcacttggccctcaattttgatactatctcatgctaactcacatagaatctgggaataggcccagagggcaaagccttagtgggccttgtaccttgagggagcaaaacgctctcgcagatactggaggggatgttctatgaatgaataaggaagccaaaaagggcaggggaggaagtattaggttggtgcaaaagtaactgtggttaaaaaaaaaaaaaaaaaaggcaaaaaacgcaattaattttgcaccaacctaacaggaaagaagcagaaggtttgaaagaagagagaagtagagtcagaaataagtagagaaaatgagggcaacatataagccactccttatttctaaggcatcctctcttaaccataagttatgaacatttccagagatgtacataaaaattattaatacatgtatgtttctgtttctatctgtctatcttatgagctccgtctttctctgtctctcttccaacatccccttcaccagcacccctctgtccctctctcttagaaaggaatcacaggagcatttgttggtctgaattccagcttccagctctcaggtctaagggagatgggttccattgtcatagcaacagtaacattggccccagtgacagttatagaaatggctaaaggaaagggcagattcaatgaggaccaaagaagatacacatactaccagagaaagagaagtggaaaaagggtgtgagggagggatcagggagttggcaggggtggggctgggtgatactcacaaaggaagtcggagagccactcgggctggttgtagtgaacaatagcaacacacagcgtgttgagagctaccaaactgagtacagtccagtagaaggcctgagttttgaccatgcggcggatgtagaaacgcatcctcctctcctttttgtgaaaaaaggtcgagttctccagcttggcacttttaatgctggctcgggcgaagggagaacctgccagggaaaagatggagaatgtcaggctcaggctgttccttcagaagaaattaaccaatgtgcagcccaagcacagattttagccaggggatccattagtctctccagcaagcctctggcctgagggaaccatcatgacccatgggcttagttttgcatagatggagcttatgagaagacagtgcccctgaaaaataacagaattagaagtaaccaattgatgggaaggctgatagttctctgttgcaggagccaattttccatgtctcccactcccagccacatctgatgcctctgggagtcacaccacagggcaggataaagcagagcctccattccctgatgcaggggcaggcaacagagctgcatggagcacgcttggaaggcctccagaaagagatgtggatgagactgttttccatggacatttaactttagaagtgatcactgaggaataagctgggtgtgtcctctgcctacatatagttttgctcttatgcatttattgagtacctattttgtgccaggctctgttccaggggctcaggatacattaggcaacagagcctggacttccggggtctgaccctctaaggggaggagacagacagtggacgtaataagtaaattaacagtgggatggaaaatgaaaagtgctatgggaaaaaaaaagttgggatgggtgcagtggcacatgcctctaatcccagtactttgggaagctggaatgggaggactgtatgaggccaggagtttgacaccagcctgggcaacacagcgagacaagttcttttaaataacaattttttttttaagagaaaaagtaaagcatcacagagggactgggagcccttggagagtccacagggtaggctgcaacattaaattgcatggtcaaggtgagtgtgttgacttgtcactttagtatcttaggtagaggaaacagcaaatttaaggtcctgaagcatgaatgtgtctgcccgacatttttggggaagagcacaaggaagtcagtgtggctggagtggagtggttgaggggaaaagaggaaggtggtgaaggcagggaggtgacaggcagatcatgcatggcctggtggaccacaaggaggactttggcttttaccctgagtgaggggggagccgtggagggttctgagtagaggagggatggaacctgatttgggtgttcacaggcaccctctggctgccgagtgggagagtagacagtgagaggtgaggacgggagctgggagaccaggctggaggtgactgaacccatccaggcaagtgatgatgatgatggatgggggctggagttgggtggtagttaagcggggaggatttgggatgaatcatttaagacagattcaacatttgctgatggaacggtgtggatgtaagagagagggatgagccaaggtgaatgaatgatgtacatacaaaggaatggatgaattggtgaaccccttaagggatggagctctcatccactgaatgggcacaggtttaggggaaggtcagagctcagttttggacagattgaatttaccttctaaaatacatcttttttttttttttttgagacaggatcttgctttgttgcccaggctggaatgcagtggcttgatcctagctcactgcagccttgaactcctgggttcaagcgatcctcccacctcagcctcccaagtagctatgactacaggcacgtaccaccatgcccgcttaattaaaacaattttgtttttggtagcaatgaggtctccctgtgttgcccaggctggtcttgaactcctgggttcaagcgatcctcccgcctcagcgtccctaagcattgggattccagcatgaattaccatgcccaggcttaagataccttttcttataaaccctcagttgcattcatttttaaatggttcttcattgattgattcattcattagtacattcattcattctttcatccatccatttgttcatttattcattcattctttcatcattcttaaattcattagcacattcatcatttatccattcctttgtgtgtacatcattcatttgctcatccattcatccatccattcgctcatccattcatccatccattcattattcatttgctcatttgtttctccattcattcctccatttatccattcacccatacatccatccagcacgtttatcaaaaccaccccacttgccagacacaggacacagcaaacacctccaaggaggccacttcctatcagcaaaattctcaacagagattttgagttggcaccctaggggccataccgactcatactgggtttgtgaaagctgaaattattggtccacatttaaaaactgggagattttccatgaaaatatggatttcagcttcccctgaatgaaaataacagctgacgtttatggaacatttagcaggcaccaggcactgcagggaacatgttttatacgacaagctacttactcctgctcagagccctaggaagtagggaccagcgtcatccccattttacagccaaggaaacaggctgaggggggtctagtaaccagtgaagatgtgtcaagatggttcagagtgtgtgctctgggccgccacattgcacacctggggcatatggtcatggggcaggggcacattccactcggctgcagttggccaggcccagtggctgtgacctgcttacagggacgcctctcctttctgcaaagacccttcccctcatgtccatcaccttctcaaccccagtggcagctcctcatgaccctgcccagcatttctggccctagttcctgaaactctcaaagatgtgtccagatctgcaggtctccaaagggcttggccaaaagaaataagacccttgggaccttgggggacaggggggatgttccacagatcgagagagagagagagagagagagagagagagagagagaaaccacagcaggtagaaggtccccagcccccactcctgctggagccacactgaaaacctggcttaatcaccaaccagcagatgaccttgggcaagccaccttggtaaactggagacaaccacacttcctacctcaaagggccatccaaaggcataaatgaattaatacatcttagcgtgatgctaagtggtaccttacgattattggatataaatcttctagtacaacctcaagagctgaaatcatgactaggttcacgtgccagccattgagaaagtccttcctgatcactcagcctgaagacacattccccacgacaggcatacccttcactggtaagggagagggaaatgaatattaattgaacacctactaagtgctggaccccatgctaggcactgtcacttctgttagttgaatttcatactcactttgtcccacgttccctttttctatacattcctgtctctcgtttttctctgtggtctggaattataattgcagacaatttctagatttttaaaaatcactttcatgagatgttttattcaacccaatacatccaaaatattaccatttcaacatggaatcaatatcaaggtggattcaaaagatattttatactctttcttttgtactaagtattcccagccggacgtgttattatgaagtacatcctagttcagggtcagccacattcaagggatcaagagccggtgtaactggtaccagtctgaaatgttcttttcctttttttttttttttcttttttttttgagatagagtctcattctgtcacccgggctggagtgcagtggcacgatcttggctcattgcaacctctgcctcccaagttcaagtgactctcctgcctcagcctcccaagtagctggaactacaggtgcccactaccacgtccgaataatttttgtatttttagtaaagatggtgttttgccatgttggtcaggctggtctcgaactcctaacctcaagtgatctgcccgctgcagcctcccaaagtgctggcattacaggcatgagatactgggcgtccgggccagtctgcaatgttctatggtgggggaaggggtatgtcaccgccaaggattcatctggtgatttctggcaatttatatacgcttaaaattatatgtaaattgtaatacagccatgtgtggcttaatgagggagacgtgttctgagaaatgcattgttaggcaattttgtccttgtgtgagcatcttaaagtgaacttacataaacctagatgttgtagcctactccacacccaggctacgtggtttgtagctcctcggctacaaacctgcccagcatgttactgtacttaatactgtaggcaactgtaacatcatagtatttgtgtgtctgaacatatctaaacatagaaaaggtacagtaaaaacacagtataaaagagaaaaggtggttcagctgcatagggtacttggcatgaatggagcttgcaggactggaagttgctcttggtgagggagtgagttgagtggtgagtgaatgtgaaggcctaggatattattgtacactcctgtatatattataaacactgtatgctcaggctacatgaaatttacaaaaaaaaatttacaaaaaaataaagtaattagggccaggtgcggtgggctcgtgcccgtaatcccaacactttgggaggccgagatgggcagatcgtaaggtcaggagttcgagaccagcctggccaacatggtgaaaccccgtatctactaaaaatacaaaaattagccgggcatggtggcacacgcctgtaatcccagctactcgggaggctgaggtgggaggacggcatgagcctgtgaggttggggttgtagtgagctgtgatcgtgccattgcactccagcctgggtgatggagtgagacttgtctcagaaaaaaaaaaaaaaaaaagaaatcgcatacagaaacacagaaagaagaccatatgacaacagaggcagagactggaattatgcatctatgaactgaggaacaccaagtatcgctggcagcaccagaaactaagaaaataccatggaacagattctcccctaaaaccttctgagggaacgtggtggctctgctgacaccttgatttcagtttggacttctggcctctagaactgtgagagaagaaatttctgttgttttaagccactgggtttgtgacattttgtaatggcaactctgggaactcaataccacccatatagagcctgtgttattaaaatgatgtaaatggatccccgtttccccacatccttgccagcacttgttatgatttgtcttttttttttttcttgtaagatggagtctcactctgtcacccaggctggagtgcagtggcatgacgtctgctcactgcaacctccacctcctgggtttaagcaattctcctgcctcagcctcctgagtagctgggactacaggtgtgcactactgcacccagctaatttttgtatttttagtagagatggggtttcaccatgttggtcagcctgcttctcctcttataaagacagcagtcattggatttaggacccaccctaattaagtttgatctcatcttaacttgattaccacctgcaaagaccctattttcatgtaaggccacatttgcaggtaccaggggttagaacttcaacaaacctcatttgtctttttgataatagctactctaggctgggcacagtgtctcacacctgtaatcccagcactttgggaggccaaggagggcagatcatttgaggtcaggaattcaagaccagcctgaccaacatagtgaaactaaatacaaaagttagctgggcatggtggcgtgtgcctgtaatttcagttactcgggaggctgaggcaggagaatcccttgaacccaggaggcagaggttgcagtgagctgagatcacaacactgcgctccagcttgggtgacagagtgagactccctctcaaaaacaaaacaaaaaacaaaaaacaaacaaacaaacaaaaagataatagctactctaacaggtgtgaggtgatagctaatggtggttttgatttgcatttccctgatgatgagtgatgttcagcattttattcatatacctgttggccacttgtatgtcttttcttttgggatatgtatgttcagatcctttgcacatttttattttttattttgagacagggtctcggtctccttctgtcgcccagggtggagtgcagtgatgcaatgtcagctcactgcaacctcctcctcccgggctcaagggatcgtcacatcttagcctcccgagtagctgtctttgcccatttttaattgggttgttttcttgctgttgagttgtttgagttccttatatattttggatattagctccttatcagatgtattgtttgcaaacgttttctcacattccttaggttgtctctttcctctgctgaacgcttcctttgctgtgcacaaattttttagtttgatacgatcccatttgtccattttggcttctgttgcctgtgcttttgaggtcctgtccaaaaaatcattcccgagaccaatgccatggagctttctccttatgttttcttggagcatctttaccatttcaggtctgacatttaagtcttttcagaacatctgcactcccacgttcacttcagcattattcacaatagccaaaatatggaagcaaactaagtgtcccacaatggatgaatggataaagaaaatgtggtatgtatacaaatagaatactatacagccctaaaagaaagaaattctgtaatgtgtgacaacagggacagaactggaggacattatactgagtaaaataagctggcacagaaagacaattacagtatgatctcacatgtgggagcttaaaactaaaaaaaattgatctcatagaaagagcaggaaggtggttcctggaggctgcaggggaggaggagggattgagaaggagaagatgttgatcaaagggtataagttgcagttagactggaggagtaagttttagtgatctattgcattgcattgcattgcatcgcatttagtgatgcattaatacattattgtgtatttatattgcattattaataaatagtaatgtgttgcatatttcaaaattgctaagagatttttaatgccttccccacacacaaaaaacggtgaggtggtgaggcgatggatgtgttaattagcatgactgaatcattctatgatgtatacatagattaaaacatcacactgcactccataaacatacacaattaccatttgtcagctgcaaataaattaataaaaaatcatgcctgtaatcccagaactttgggaagccagggcaggaggatcacttgaggccaggagtttgagaccagcctgggcaacatagccagaccccatctcaacaacaacatcaacaacaacaacaaattagctgggtgtggtggtgcctgtagtcccagctacttgggaggctaagctgggaggatcgcctgagcccaggagctccaggctgcagagagctatgatcatatcactgcactccagcctgagtgacagagcaagaacctgcctttaaaaacaaataaaatcatctaaatggggtctggttttcctaaaaaagcagagttacaatggcagcttccattcataatggatcaacttttttttgttttgttttcatatgctccacattttacttatttatcattgtgcttcttcttcgtcttcttcttcctcttcttcttcctcttccccttccccttcctcctcctcttcttcttccccttccccttcctcctcttcttcttccccttccccttcccattcctcctcctcctcctcttcttcttcttccttcttccttcttcttctttcctcctcttcttcttcttcttcttttttttttttttaatacaggccaggtacagtgtctcacacctgtaatcacaacactctgggaggccaaggtgggaggctcatttgaagccagggttttgagaccagcctgggcaacatagcgagaccgtgtctctatcaagtattagctgggcactgtggcatgcgcctgtagcctcaaatgatcctctcaccttggccttccaaaacattgggattataggcatgagccaccgcaccaggcctgtattattgcattctttacagaaataaataaaggctcactctatcacccaggctggagtgcagatcttggctcactgcaacctccatctcccaggttaagtgatgcctctgcctcccaagtagttgggattacaggcgcccgcctccatgcccagccgatttttgtatatttattagagacaaagtttcgccatgttggccaggctggtctcaaactcctggcctcaagcctgtcttggcatcccaaagtgctgggattacaggtgtgagccaccgtgcccagccatactgttatttttctttttaaagttattattcatttattttaaattgacagatacaggctgtatctatttatagtgcataacatgatattttgaccatatgtatacactatggagtggctcagttgagctagttaacatatgcattattacatatgcttatcacttttctcacggtgagaatgcttaaaacctactctctgagcaattttcaagtatataatacattgttattaatacagtcgccaggctgtacaaaatagatctcttgaacgtattcctgcagtctaaatgaaatttgatatcctgtcaggcgcggtggctaacacctgtaatcccagcactttcggaggctgaggtgggcagatcacttgaggtcaggagtttgagaccagcctggccaacatggtgaaaccccatctctactaacagtacaaaaattggcagggcgtggtggtgtgcacctgtagtcccagctacttggaggctgaggtgggagaatcgcttgaacctggaaggtggaggttgcagtgagccgagatcgcaccactgcactcccacctgggcgacagagtaagactccatctcaaaaaaaaagaaaaaaaagaaaaaaaaattgatatcctttcagcaacatggctcaacttttcatgtaaatgattcaagttccttatttcagcagtaagttcatcaattaggaatgaacctgctttatagtgcgtttatcaactgattcaacagcgcagtagaatcaccaattatataagactgcatgtgggccaggtgtggtggctcacgcctgtaatcccactgctttgggaggtggaggtaggaggattgtttgaggccaggagtttgagaccagcctaggcaacatattgagatcccatctctagtaaaaaatataaaaaacttagctgagtgtagcagtgtacacctatagtcccagctacttgggaggctgaggtgggaggatcacttgagtccaggggtttgaggctgcagtgagctatgcctgcaccactgcactccagcctgaacatcagagcaagacactgtctcaaaaaaaaaaaaaaaaggactgtgcatactgtggtataatgtgaacgtgaacgcaaataccacatagctcccaccttactttgaaatatgcattactgtattattacttttttttgtttttttttttgagatgaagtctctgtcacgcaggctggagtgcaggggcatgctgtggctcaccgcagccttgacctcctgggctcaggtgatccacctcagcctcacgagtagctgggactactggcgtgtgccacaatgcccagctaatatttgatagagacagggtctcactatgttgcctaggctggtctgaaactcctgacctcaaacgatcctcccacctcagcttcccaaaatgttgggattacaggcgtgagccaccacacccagcctgtattgttgcattctttacataaataaataaagctaaatgtgattccttgccagaatcctggaattccagagatctcttttggggtggtctagaaaaccactggctagattgggggctcctttctttgtctttttgagtaatcaggctgatgaggtgggttttggtggatttgcctgtagcaaacgtggctatgaaagaacaagccactggcctgggttttgggtctgtttagaaagctgcaatgtcacctgccttgttaacagaggcggaggctgcagtgagccgagatggcaccattgctctccagcctgggtgctagagcaagactccatctcagaaaaaaaaaaaaaaattaaaaaaattaaaaatatatatacatatatatgtatatgcagattttttatttttttgatggagtttcactcttgatgcccaggctggagggcaatggcgccatctcagctcactgcagcctccgcctcccgggttcaagtgattttgtgcctcagcctcctgagtagctgggattacaggctcacgccaccacacccagctaattgttgaatttttagtacagacacggtttcaccatgttggccaggctggtctcctactcctgaccttaagcgatctacccgcctcagcctcccaaagtgctgggattacaggcgtgagccaccgcgcccggccagcaaagtagatttttaagaatgtatgttattttatttttttaagagacaggttctcactctgttgcccacgttgcagtgcagtggcacaatcatagctcactgcaaccttgaattcctgggttcaagaaatcctcctgccttagcttcctaaatagatgggactataggtgtgtgccataatgcctggctaagtttttcaacattttgtttttcagagatggagccttgttatgttgcccaggctggtcttgaacggctgatcttaggagatcctcctgcactggcctcccaaagcagtgggattacaggcgtgaaccactgtacctcgtcataaaacagattttaaacaatggaggtaacgtaacacgtgagacagacataattgatcaaatactcaagacacctactgagcgctccaattcttgacatttgcttacaggaaattaaacagatgcacacacgagtggaagcagaatgagttctccattacaaagaaaagcgtgttttggctggaaattaaaaatgcaaatgaaaacaagctttaaggtttcattacaaacccacttaactgggaaaggaaattaaattggtaatattcgatggcctgggtggggaatccatgaacatatgcatacttggcaggtttataaatgggttccatgtttttgaaactcagaatggctctttgaataatgagttgaaaagctgttaatatctttgatcctataattatccccaaggaaatacgcccaaagggtggggggagtcattgtacgtaaatgtgcacagcagtgttcttcgtaagagaaattattggaaacaactcaaacaccctataatagagctatggctaaacaaaccatagtgtatccaccctacgagatatgtgatcgcaatggaaattatgcctaaactcagcaataaggttataaactaggggcgagcgataaaaggggaatacgaaatagtggatcagaaactatggatcagaaacacatggatgtactaacttccctccttccttcacttctctccctccttctcttcctcccttcctctttctcttgccatcctttcttcctctaaactgcggccacacagtttcccaagcagcctaaattccttctcccctcaatcttattccagtcttatttcctctgcctggatgctcttccttccattaaaaacaaaaacccattaaagaacaacaacaacaataacaatacattctcactttagaaggtcaaaatcaacatcatcacagccaatgaatcaataggacagaggagtgagaagggaaagaataaatgttccctcctccctcgaactctggcccttgtggtggcaaaggtctgagccctgcctctcacactgttccttctgctatcaccaccacagtgatctcctacccatccttcagttcccagcttaaccgtcacttcctccaggtagccttccctgactgctccccatccttctagagcaagctaagcccagagcctctccctgaagtgccattaccattacaggtttatttgtgtaattctctgtttaatttctatttcctgcactggactgtgagctccatgtaggtagggatttggtttgtgtcttttttttttttttttttttgagacaggatcttgctctgttgcccaggctggagggcagtgatgagatctcagctcactgcaacctctgcttcccaggttcaagtgatgctcccgcctcagcctccagagtagctggaactacaggctaatttttttcgtatttttagtagagccagggtttcaccatgttggccaggctggtctcgaactcccgacatcaggtgatccgctcatctcagcttcccaaagtgttgggattacaggcgtgagccactgtgcctggctcagtttgtgtctttttttttttttctgtgcccaggctggagtgcagtaacacaataatggcttattgcagcctccacttcccaggctcaagtgatcctcccagctcagcctcgtgactgccttgtcttgtttgcaaccaagcacctaatataagcaggtcccccatgaatacttcccgaatgagtcacaaacattcaccaacttgactgggagcttcgtccctgccaggtgctggtttgccatgcttcatggggatcatttagttgaattcccacaaaataatgagaagctaggcacggatgttattcccataatgatgtaatctgcccaggacacacgcacaggtgggaaagggtggagctgagacccaaatccaggcagcacggtttgcaagccctctgcccccaccccaccatgtctcttgggcgataggtgatgaacaactgataggtggcagaggaagggactcacccacagaggctatatcagccagctgatcctcagcctcttcggggttgagcaaatctgtcttgcttttctttatggtggttctccgcagagctccaacaatggaaacatggcaagagaaaaagacgttaccctttttgcaacacagaccatatggacacagtgtgtccttggatttaactctcacggcaactgttctcacgggaactaatagtatacccatttttcagatgtgtaaactgaggttcaaggtggcactatcactttgcttaaaggggtaaagacaagaatcaagtcgggttcagtccgactccaggtctgggccctcagccactattttccttctggtttatttatttatttgtttatttattttgagacagaatcttgctctgtcacccagagagtggtgtgatcttggcttactgcaacctctgcctcctgagttcaagcgattctcctccctcagcctcctgagtagctgagactacaggcatgcaccaccacgcctggctaatttttgtattattagtagagatggggttttgccatgttggccaggctggtcaaactcttgacctcaagtgatttgcctgccttggcctccaaaagtgctaggattacaggcgtgagccgccccactcagcctctatttttaaattctaagaaacctcactttcttatgaaaacagtccaccccttgacctgtagcatactcgctaggcaggctgcaattttgggattctgcccccatattcaagctatacaccccaggggctccacagcagacaagttcaggtgtagacttccaataaaaagatttaggtaccctaaatgagttagattacctaactcatttaggggagttaggtaatctcccctccccaactaagataataaaattcattttataaccttctgggacgcagtgccagttcttttatttccctcaaatctctcagatttttaatcaaaagtcatcaccctgtctaaccagctttctttcttttttttgagacagagtcttgctctgtcgcctaggctggagtgcagtggtgtgatctcggctcaccgcaacttccgtctcccaggttcaagcaattctcgtagtttagcctcctgagtagctgggattacaggcgtgtgccatgacacctagctaatttttgtatttttagtagagatggggtttcgccatgatggccaggccggtcttgaactcctggcctcaagtgatccacccgccttggcctcccaaagtgctgggattacaggcatgagccaccacgcccagcccctgtctaaccagttttctaaagtatgagaagataaatctcaagcaagaagttgcatttttcagggagtactattatttttcttattgctgttattattatattgcagacatattattctggcctatctctaaattctttttttttcttttgaaacagggtctcactctgtcacccaggctggagtggagtggtgcccactgcaacctcgacctcttgggctcaagtgatcctcccacctcagcctcctgagtagctgggaccataggtgcgtgtgcccccacatctggctaagtttattttttgtagagacggaacctcattatgttgcccaggctggtcttgaactcccaggctcaagtgttcctcctgtcttggcctcccaaagtgttgggattacagatgtgagccacagacagaccgcatccaaccctatctctaaattctaggaaactttactttcatgaagcctcaggttggatacacagtgactcttacagtctgtcccctgactcccagctatgctggggaggttgggcttttggacacctttttaatggtccctcctttcatattcaggtttccaggggaccatgaattgacatctacactcccagcattttgggaggccaaggtgtgcagatcatttgaggcaaggagttcaagaccagcccggccaacatggcgaaaccccatctctatcaacaatataaaaattagccaggcatggtggctcatgcttgtaatctcagcttctcatgaggctgaggcagagaattgcttgaacctgggagccagaggttgcagtgaggtgagatcgtgtgactgcactccagcctgggtgacagagcgagactctgtctcaattaaaaaaaaaagaaaagaaagaaagtcatggttctgtctcgttaagtttctaacatgggagacagcagccgttcacagtaaactggattattggtggaattattacttatttagcaaacagaaacgtgctgaccccatgccaggcactatcccaggtgttctatttgccataacgaatatcattctgagaaacaatctcgtgagctagggtattgtttatatcatacccattttgcagatgagaaaaaccaaggcacaaagcagaaaaaaccaggtccatggttaaaacaaaaaagtggaggccagaatagggaaactctgcatggaagtcctaaaattcctccaagaggaacgtctaccctctgcaagatccttagaaccagtcacctgctctcccccgactccccaccacagcttctcccttctcccctgggacccacccctgaggtgggtttagagcagttaccatcaaagggatgcctctgctccccgtcagtttcatcctcggcgaggatcacctcttctgaagaggaagagcacagagttaagctcctgcatttggaggatgagttctcccttggaccaggaagaagggtctgcccggccacccccattctctgctgactgatggtgacagctcaaccgaccaaaaaacatgctgctgggtggtttgtgacttcaagccccacctccgcaacagtagcaatagccaacattctccccacctcgcgcaaaataaaaaccaatgtccacaccacagcctataagcccctgcttgatctgatctccatcaccttcctgtcttcctctcctccagctgtccccacctctcactctgtttcagctgcactggcttccttgctgtgtctcaaatacgttcctagctcagggcctttgcacttgctgtctctgcctggaatgccccttcccttgacatccccacagcttccttcttcacgtccttcaggtctctctgctcagagggtacttccttagagaagccttccctgaccaccctgcctctaacttcctactcttttttttttctctgacacagagtctcactctgttgcccaggctggagtgcagtggtgcgacctcagctcactgtaacctctgcctcctgggttcaagcaattctcctgcctcagcctcccgagtagctgggattacaggcgtgcgccaccatgcctggctaatttttgtatttttagtagagacagggtttcaccatgttggccaggctggtctcgaatgcctgacctcaggaaatctgcccgccttagcctcccaaagtgctgggattacaggcgtgagccaccgcgcccggccaacttcctactctgttttatcttcctagtctgttttatcttccttctctgaatttgggagttcccaacatgacatgtatttgtttgctttatctctctcattagaatatcagagctctgagggcagggatttggtgtgtattgtttactcccatatcctcagtgcttagatcagtgcctggcacacagcaggtgctccctaaatgtttgttaaatggctgaacaaataaatatgtgcctaccgtgtatcaggcacttctctccccaagtgactcagctgagattattttactaaatactccaatagtactatgacttaggcactaccatcgcctccatgtaacagctgaggaaacggaggtacagggatgtgtggtgcatgggtaaaaagtggcagggccgggatgtaaaccagcgtctgatttcagaattcaagttacgtgatgtcagatcctggcttcatcttagacttcttcatatcagactctggattcttgttgataaaatttgggactaccaattcaggttctctttctcctcccatcataaccctcccagcttagccttctccaaactgcatgactctctttgtactccgtggcctgggatctccatccctgggccccaggatgaaagggcctcacctgcttttgagatccactccatgtacccattgagctcacgttcaatctgttgttgccgcctcagcttcagaaaagcccgccggttctccacccgttccctttctttggcaaactccctggagaagcatagaaaagccagagtatggctgttttgaaaatgttaggaaacgtttgtgtgtgtgtttgtgtgtgtgtgtgtgtgtgtgtgtgtgtgtttgtgtgtgtgtgtgtgtttggggattcagaagtccctggaggtcaggagttttcaacaggaggagtcaggacttctgggaaaagactgggatattatagtgatgggtgcttctgccagcttcacacatttcccgacaactgtgcctaggtaaagaaaaaggccaggcacagtggctcatgtctgtaatcccagcactttgtgaggctgagatgggagtatcatttaaggccaggaatttgagaccagcctggacaacacagtgggccccatctctatgaaaaataaaaaatgtagctgggcatggtggcatacacttgttgccttagctactcaggaggctgaggcaggaggatcgcttgtgcctaggagttctaggttacagtgagctatgatcgccccctacactccagtctgggtaataaagctagacaccgtctcaaaaaaaaacaataaaaaagaaaaaaaccgaaaggataaaaccatgccatgccaaccaccactggctgcatacctcattctcattctcttcatacttttggctaataattatttcagccctcttttaagttagaccaataagccatgaatgaaagatttctgcagcaggttggcttctctgccataggtcccacctcttcctgtttcccttcttccttttcctgtttggaacatgaagtggccatccggagggcgtgaggcagccatcttaagaccatgaggtatccacgagattggaagcctctggtaaagatgtcagaatggaaagctggaagaatctggggttgctgatggtgccatagagccaccatacaagtgcccagacttcttatggtaagaaaaatgaagcccatttatgattaagccaaaaaaatcttggggatagaggacaatatgggtcaggaaaatacaccgttagagcatatgctatgattttatatttggaaaatgggggagaagtaaacccaaactattggtttttaaaaaaaatgtaaagaaagtaaagcccatatgaaccctctcactgggtacccctagcagtacacaacctctgcacctgtgcatggcttgctaataacagtctggtaacccaaacaagggaagaagccttttctctgtctagtgaatgaaaacaaagcttcaatggcctctacttggaaagaagttagcaaagaggagtgagtgggatggggtggggagtagcagaaacttaccctgacagcacacccagcacaaggttcagcataaaaaaggagccgatgatgatgagggggatgaagtacaaccagttccaagtgttccctgaggcatcgttgctctgtagggtgtgaggagggaaagcaggtgagagttgactgggactcagatagaacctgacaggtgagggaaggggaagctcggttctcttgtggctctgtcttaaatgttcttggcttgtggagttctggggctctggcatcccagagggggaaatggaggaacgttttctgaagaaaacatccaaagggtaaagctctctcttaattatgttctcctcacataacataattgacctgggaatggagtaagaaacacaagaggacttcccagaccacagtccagaaggagaaggaaaaagtaaaccaaacaaaacacaaaacctattgaaatggattaattaatccctggttccttctcttctcccaacacagtcatagactccccttagaggagatgcatgaccacagagtctgatggcctggtgaaatcaccaagccagacagatggtccatgagccctttcctcaagtgtctccctgctccattccctgcagccttaatgccaatcacaaaaaattctcagaagtttcagctcaattttcaagaggaaaaaagtccacaaatagaatactctctgaaacagaaaatagaacactatagcaagaaggaagtaagatgaggggaagaaaatcaaggagaggaggttggggggtggagagagaaagagagacagagagagagagggagagagagagagagagagagagagagagagagagagagagagagaaaagaatgataaaagccagcacttacagagtatttatggtgtgctggcaccttcctaagcacattatgtatgttagctcacttagtcatttaatcctcatgatgcctctatgttataatgcccatgttactattgaggaaactgaggcttagaaagacaaaatcatcagcccaagatcacagagttattcactagtggacatgggatttgcactaaccacctggccccagagtccatgggcttaacctctgtgctgggaagccttgcctccagctgtcagggcaggggtagcctttgaatagttgatcaccctgtgacacctgcagaatgcagggctctcaagtgtggctttaaaagcccacctttaaaagcatgtatgacactgctgctgcctggaagaaaggctaaaatgagaaagaagttaagatgaggtcattactaccaggtgtctgtgaagctgtggagcaactggaaccctcataatctgccaatgggagggcaccatgctgtattcatctcctgtggctgctgtaacaaggaaccacaacctaggtggcttaaacaacaaagatttattgtcttacagttatagaggccaaaaatccaagctcaaggtgtcagaagggctggttccttctgagagctgtgagacagaatctgttttatgcctctctcctagcttctggcggtttgctggcaatctttgctgattcttggcttgtagaggcatcatcctgagctctgcctttgtttaaacatggcattcttcctgtgagtgtgcctgtctctgtgccaaaatctcccctttttatatggacaccatcgtattagattaggacccaccctaatgatctcatcttaactgctatggttggtgcaaaaataacggcagttttgccaatggcaaaacctttacatgtgcaatgaatctatttccaaataaggtcacattctgaggtactgggggttaggacttcaacatatgaattttggggtgagacaataaaacccataacacatggtacaactacttgaaaaattggttgagagtttctatgctaaaattaagtcatgcttaacaatgggcatacattctgaaaaatgtgtcactaggtcattttgttgtgcaaacatcatggagtgtacttacacaaacctagatggtatagcctactacacacctaggctgcatggtctcgcctattgctcctaggctacaaacccatacagcatgttattctatggaatactgtaggcaattgtaactctatagtgtatctaaaaatatctaaaaacaggccgggtgcggtggctcacgcctgcaatcccagcactttgggaggccgaggcgggcagatcatgaggtcaggagatcgaggccatcctggctaacatggtgaaaccccgtctctactaaaaatacaaaaaaaattagccgggcctggtgacgggcgcctgtagctacctgggaggctgaggcaggagaatggcgtgaacccagaaggcggagcttgcagtgagcggagatcacaccactgcactccagcctgggcaacagagcgagacttcgtctcaaaaaaaaaagaatctaaaaacagaaaagctatagtaaaaatactgtatgataatcactgttatgtattcggtccattatgggaccactgttacatatttgatctgttgttgaccaaaatgccattgtgcagtgtataactgtatgtacctttgccaacacccagtaattcttggatagttactgatccaagatcactacaattagatagtaattccgaaatagtaattctgaataattacacaacagaaagcacacacaagaacattcatagcaatggtattcatcatagctccaaattgcaaacaatccacactgttatcaataggagagagaggatacatgcaatgaacaatgccacaggtcacatgagatcttaaaaagttaacgtcaagcaaaagaagccagacttcatttatgcaaaatacaaaacaggctaaactggtgaatgatgctcaaagtcctggtaggggtacccttgcggggaggtagtgactaggaacaggatatgaggggggcttctggggctgagaagtttctgtttcctcatttgtgtgctggttacatggatgtgtttagtttgtgacaattaatcaagctcttcacttataatccgcggatttttctgtatgtttattctacttcaattcttaaaaagttgtttttttttgagacggagtcttactctgttgccgaggctggagtgcagtggcatgatctcagctcactgcaacctctgcctcccgggttcaagcaattctcttgcctcagcctcctgagtagttgggattacaggcgcccgccaccatgcctggctaatttttgtatttttagtagagatggggtttcaccatgttggtcaggctggtcttgaactcctcacctcctgatctgcctgccttggcctcccaaagtgctgtaattacaggcgtgagccactgagcccggcagaagtttttttttaatagtcaactttaccttaaaaagaaagaaaatgctgatacgtgctgcaacatgggtgaaccttgagggcattatgctatgtgaaataaaccagtcataaaagggaaaatcctgtatgattccatttataggaggtccctagagtcgtcagatttataaaaacagaaagtagcatggtgggtgccaagggctgggggagggggaacagggagttcgcgtttagtggggacagagttacatttggaagatggaaaagtttgggagatggatggtggtgacagttgcacaacaatgtgaatgtattatacttaatttcacgaaactgtatccttaaaaatggttaggatgacaacaatatattaatggtttcaaatagctagaaggaggagcttgaatgttcctaacagaaagaaacaataaaggtctgagaagatggatatgctaattaccctgatctgagcactacgcattatatgcattgaaacgtcactatgtaccccatgaataagtacaattacttgtcaattaaaaaatgttacaaagttaaaaaaaatattaggatggtaaattttatgtcatgtgtgttttgccatggattaaaaaaaaaaaaaagcactgaaaataaaactaacaaagtcagctttaatcatggacacagacaggttctggggacaatgaatgtgccagccaccagcccacatccttgttttaacgagctcagaaatgccaatgctttgcttctggaaggttctggaagaaagaaccgagtcagcggaacattgctggacagaaggcagcactggctttgtgctcctctctccatcactttggcggctgagggttctcgttcccatttctcagggctaaatatagcccagggaacgaaactctgcaccggccgccagtagggagactctgagccatcacgaggagcaggctcagatgacagggacagggtggaggatgggggagagggacaggactgaaagggaaaaacagccgaggcccttccataccaaggcagcccgtccatctcaggtgctgccaacaagacccgaatctgcccttgcctgggtcctcgacaagcttgggaacctctggccacaggacatgctacccagcaccacaacagacacacgtggaggcttggactgtttgagctcatttaatcctctcatgaaccccaggagtgggtatataattatccccatcctcccgggtgagaaagctgaggcacagagaggtctattttttttttttttttttttgagatggagtctcactctgtcacccaggctggagtgcaatggcactatcttggctcactgcaacctctacatcctgggttcaagcaattctcctgcctcaccctcccaagtagttgggattacaggtgcttgctaccatgcccagctaatttttctatttttagtagaggcggggtttgaccatgttggccaggctggtctcgaactcccgacctcaggcgatccactcacctcggcctcccaaagtgctgggattacaggtgtgagccatcacgcctggccgagaggtcaagttacatgcccacagttctgttgtgggttgcagtgggtctctccaaaaagatgcattgaagaagtcctaatccctggtacctatgaattggaaatagggtctttgcagatggaatcaagttaagatcaggtcattagggtggaacctcatcctaaatgacgggtttccttataaaaagaggacatctgggcagagcacagtggctcacatctgcagtcccagctactcaggaggctgaggtaggaggattgcttgaggccaggagtttgaggctgtagtgagctatgatcgcaccactgcactccagcctgggagacagagcaagaccctgtgtctaaaataaagaaacaaacaaacaaataagtaaataataagaaaaggagaaacctgggcacagagacaaccttgcacagagggagaaggccatgtgaaatggagatgaaggcgggatcagggtgatacgtctacaagacaaggaccaccaagcactgttggcaaaccaccagaagctaggagggaggcaagaagggatttcagaccaagtctcaggaggcaccatggcccagctgacatcttgatggtctgtggcccagctgaccttgatggtctgtggactcctggcctcctgaactgcgagagaataaataaatttctgttgttttcagctactctatttgtggttctttgtggttcaagctacaggaaataaatgaagttactcagttactgaatggcagagggggcctccaaccctcccatctccttgcttttatctcctccccttttccctcgctcattcggttccagccacctggcttccttgcagtttctcaaccacgccaagcacagtcctacctcggcccttgcacaggctgtccctccctgcctggaatgctctttcctgagattgctacatggtttcccctcacctccttcaggttttttactcaaatgccaccttctgagggaggcctcccctgatggccctttacaattgcacccctcatttctggtccccattgtttcttttttcccatttgcatttcaccgcctatatactttacttatttctcttgttctctcgtcttcctggctggaatgtccattcgacaagagggaggggctttgtcctttttgttccctgctgtattcctgtattcccagccccctaggacaacatctggcacacagtcggtgctcaataagtggtgtctgttgaatgactgattgagaggtgtgtccaagttccctgcatagctcagatcgtcaaccccaagccaagctccctcctgaactctcatctgcaccatcctctctggggagtgggcttctgctgcctgattttagagacactttttctcttccaaactcatccaattattcaattccatactctggaatcaacaattcccagggaagaaggtggtggaaggctgggtgcagttttggattaggagatgagctttccctggtttgggggtgggggtgggtggatttcgttcaggagcaaaatgaaaagtacattttacaagcacaaggactggagatgccatggctgttctgtggtagttcatcagcaaagatggggtcacagatctcttctcctggttctcatctcttctttggcagttcaagttaagggagggatatgcacaagtctgaattcgggaaggagagtgggggaggatggcttgctcatttgttaaattcattaatattgggaaggatgtgctctagagatcgccttgtctttcttccaagggctcaaagacttccactgcctggaacactgttccccattaatgctgccatcaaatatttccagcaatatggtgggatggtccttcctgagtccctttggggttggctgaggaccacatgctaagtgctggccaatgaggagtgagtggaaatagctgtcattttggagccagagcattgaactttcagtgtgggaccttctagcattccttttttccttctggaatagcaagtggcaatgttctaggtgattagctaggtctcaagtgactgcactgaacagagcccccttcttccccactgccaacctgcactggacatgtagcatgagcaggaaatacatctgttgtcaaaagtcatggaggctttggggatgtttgttactgcagcataacttggctgccctgaccaatacatctttttaattaaatttttatattttgtagagagggggtctctgttgcccaggctggtctcgaactcctgggctcaagtgatcctcctgcttcagcctcccaaagtgctgggatttcaggcatgagccaccacgcccagccagattgatacagtttgatatctctgtagcttgctccttcacctctttctggtctttctttcttttttttctttctttttttttttgagatggggtcttgctctgttgcccaggctggagtgcaatggtgtgatctcagctcactgcaacctccacctcctgggtccaagtgattctctgcctcagcctccagagtagctgggattacaggtgcccgccaccacacctagctaatttttgtattttttaaaatagagacaagatttcaccttgttggtcaggctggtcttgaactcctgacctcaggtgatccacccacttcagcctcccaaagtgctgggattacaggcatgagccactgcacccagcctccttctggtctttcttaaatgccaacttctgattgactcttttatggatcccatgaggcaggtgagaaagtgtctgtctcttgcatgtctgatggagaacatacattcttctcatcagcacatggacattctccaagacagaccacatgttaggccacaaaacaactctcaacaaattttaaaatactggaattctgtcaagcatcttctcagactaccgtgggataaaactagaaatcaataccaagaagaatttcagaaatgatgcaaatatatggatattacgcaacatgctcctgaacaaccattgggtcaatgcagaaattaagatggagacttaaaaaattttggaaatgaatgaaaatagagacacaacacaccaacacctgtgagatgcagcagaagcagtgctgagggaagtttacacttgaccttagctaaagggccaagaagcaactaagagggaagtttatagcatcaaatacctacatcacaaaaaacagaggccagatgtggtggctcacgcctctcatcccagcactttggggggctaaggcaggaggatcgcttgagctaggggtttgagaccagcctgggcaacacagtgagaccccatctctaaaaaataaaaataaaaaaattagctgggtgtggtgctgtgcaccagtagtcccagctactggggatgctgaagtgggaggttcacttgagcctaggaggcagaggttgcagtgagtcaagatcatgctgctgtactccagcctgggcaccacagtgagactctgtctcaaaaaagcaaaaaaaaaaaaaaaaaattacaaattaagaacccaacacgtacctcaaggagccagaaaagcaagaacaaaccaaacccaaagttagcagaagaaaagaaaggtcaagttcaagatcacaatcagccaattatttccattctctgaacctatgcctggagcaactctgcctttaggtcttggcttggccaatttcttcttatcactcaaccttagatccattgtgcccccatcagagaagccttcttggacctctcaatcaaaaggacttgccccttcctgcagctcagccagacatctcattctcttcccagcacgttccactgtctgaatcatcttgtcaacttatgcatttcaagattgtcatcttgatcatcagctcctccagggtagagatttttcctgtctaaatcccagtgtccagatcagcaccagggacatagtaggtgctcactaagcattagttgcatagtcaatacaaatgttcctggggttcctgttggtggatcatttattttatttatttatttatttatttatttatttatttagggacagaatctcactctgtcgcccagactggagtgtgatggcacgatctaggctcactgcaacctctgcctcccaggttcaagtgattcttgtgcctcggcctcccaagtagctgggattacaggcacgcaccaccacgctcagctaatttttttgtatttttttagtaaagatggggtttcgccatgttggccaggctggtcttgaactcctgggctcaagcaatccgccctcctcagcctcccaaagagttgggattacaggggtgagccaccatgcccagcttggtggatcatttaaataataaacacaggaaatgtgtttatcccaaatccaaatgattaagctatttttctgggaaaggagaggcagaaggcagaattatggtcgcattagccaagtctttttgggctgatgaaatactccccacatcttcctcgattcccgccatctctgtgcctggtggatggagaaactgaagctgagagaggcaacatgatgtgcctggatcacacagggtgcagatggcatgggtgggactagacccgtcattctggcctttacaaccaactgattttttcccacttcaccccttctccgtacttgcatagtattttaagtaaataacaatgggcccaagagagcttcaagggtgagggatgttactgattcatcccagtatcgctggtggtgcctggtgcttagaaagcgctccataaatactcatcaaacaaactaatggctgagtcccagcaaaatccttcagtgccttctgttttatggtttattttcctctaatttttttgagcatggttcattgagaaaaagtatacaggatgttaaaaaaacaaaaacaaaacaaaacaaaaggaaaaaaccccaaaactcagctcaggagaacacccgtttctccagtatatgggataaacatgggggtggatttgagtgtgaaaaagctgaagtctgacagtgaccgtgagagaggctgtgtgtcccactttatacccgttatagatcatgccaggcctgctaattattttttcagtgctctttttcccctttcactctcaaaactgtcctggtttggatcataaattatataggctgtctgttcacgaagtctttttttttttttttttttttttgagacagagtctcgctctgtcacctaggctggagtgcagtggggtgatctcaactcactgcaacctccatctcctgggttcaagcgattctcgagtctcagtctcccaagtagctgagagtacacgcgtgcatgaccacgcctggctaacttttttgtattttttagtagagacggggtttcgccatgttggccaggctggtctggaactcttgaccttgtgatccacccgccttggcctcccaaagtgctgggattacaggcgggagccaccatgcctggctgatccatgaagtattttatcatcttccttcatcagctccttccttcatcctcactcactccccactggacatctgggcagctacatgtcctcacaaatgccaggaacatcctgcctcaggacctttgcactggctgttccatctacctcggctgctgttccctgagatatctccatggctcccttcatctccttcatgtctttcaaaaagcctcaagcaattgctggcctcaaactatcctctcctgcctcagcctcccaaagtgctgggattacaagtgtgagccatcacacccagccagggacatacattaatgatcactaactaaacatagttttgttgctttattaattgacattcaccaagggagagaaggagagaaatgtttatttattaaggaaaatttttaattgattatatatatatatatatatatatatatatatatatatatatatatatatatttttttttttttttttttttttttttttttgagacagagtcttgctctgttgtccaggctggagtgcagtggcacgatctcggctaactgtaacctctgtctcctgggttcaagcaattcttgtgcctcagcctcccaagtagctgggactacaggcgcctgccaccatgcccagctaattttttgtattttagtagagacggggtttcaccatgtagcctagggtggtcttgcactcctgagctcaggcaatctgcctgccttggcctcccaatgtgctaggattacaggcatgagccaccgtgccaggctgatagatgtatatattttttggatacatgtgatactttaatgcattcatatgatttgttccttcaggtctgttttttttgtttttttgttttttttttttgagacagttcttgctctgtcatccgggctggagtgcagtggcatgatcggctcactgcagccccaacctcccaggctcaagcagtcctcccatctcagcctctcaagtagctgggcctacaggcatgctccaccatgtccagctaatttttaaatttttttttttgtagagatggggtctcactatgtgcctaggctggtcttaaactctagggctcaagggatcctcctgcctcagcctcccaaagtgttagaattatagatcataatggccacggtgcccggccattcggggtgtataagaagaactgcaacctctcatcttgacaatgcacaaactctctactgttttattctatcccggacctctcaccaccctctaacactatctctaaggcagtgatccacaaactacagcccgcgggccagccacctgtttttataggttaacgtttaattggcccacagccatgctcattcacttacgcgctttatctgtcgttactttcacgctacaggagcagattgagtcgttgcgatggagaccatctggcccacaaagcctaaactatttaatgtctgctgtctgccctttttatcccaactgatcactggctttccccaccaacacgtcaactcctctgtgtccagaagagtgtctgcatacagtaggcattcaatgatggttgttgaatgaaccagtgatttatagtccaaagtctaatgctttgattttggtcaagacaaacatctatgaatgaaaaagggcatgggtcaaaggtgattccaaacattagcaaccactggccaggggacacgcatttatttatttatttatttttaattattaggttttttttgagacagggtctggttctgtcacccaggctggagtgcaggggtgtaatcacagctcggtgcagcttcaaacccttgggctcaggcaatcctccttcctcagcctcccgagtagctgggactacaggtacacaccaccatgcccagctaattaattatttttcttttttaaagatggggtcttgctttttgaccaggctggttttgaactcccggtctcaagcaatcttcctgcctcagcttctcaaagggctgggattccaggcgtgagccaccacgcctggccagggacatgcatttatgatcacaaattaaacgcagtttttctgcttttctaattgacattcaccaaaggagagaaatagagaagaagagaaactcacagagaaaagcacaaagaagggtgaggagaagggagagaaggagaaggaggtggagaaagagaaggaagagagagagagaacacaagaataaaagagacaaaggctgggcatggtggctcatgcctgtaataccagcactttgggaggccaaggcaggcagatcacttgaggtcaggagctcgagaccagcccggccaacatgttgaaacccagtctctgttaaaaatacaaaaaattggcaggcacagtggctcacgcctgtaatcccggcactttgggaggccaaggcgggcgaatcatgagctcaggagatcgagaccatcctggccaacatggtgaaaccccgtctttactaaaatacaaaaaattagctgggcgtgttggtgcatgcctgtagtcccagctactcaggaggctgaggcaggggaatcacttgaacctgggagtcagaggctgcagtgagccgagatcacgccactgtactccagcctggcgacagagcaagactccatctcaaaacaaaacaaaaccccccaaaattagctgggtgtggtggcacgcacctgtaatcccagctacttgggaggttgaggcacaagaatcgcttgaacccaggagatggaggttgtagtgagccgagattgcgccactgcactctagcctgggtgacagagtgagacgctgtctcaaaaaaaaaaaaaaaaaaaaagagagacaaagagagagagggaaaaagaaagagtcagagagagacggatgaagggtgatgaattgtgtccagagctgtgtgtgaaccctggctttgtcactcttggctaggggaccttggcaggtcacgtcaccctgtgggcctccgtttcctcatctggaagatggggttaaaaatatctttcctcacagggctgttttacggatcaagacacaatgtaaagctgatgccaggcacacagaagccctcggctaaaggcagccccaaattaactcaagacaccctggtcctgccaggtccccagcccctccacatcccctccttgggggcaaccaagagagggtaggtcctgtaccccatgaagtgaccccaatttgccttggcccagctggcaaagagggggtcagggaccttcccctgtgagagtggagacaatttctggcttttctgagccacatggggcacatagggtgagggggtccctgtgaaatgaggccacctgtcactagaacaacacagagccaccagctcttgtctccagcaaacagttttgttgcagtactcatggggttccccattctatccccttgagctcagagaagcagccctcaatcctatttgctgtgggaggctataaatggcagaatctgaggatgttgacactgagtgagacagagctgaattctgactctcaatcgctgtgcacagctctgggactcagtttcttcatctgtaaaatggggatattaaaggccctagctcagagagttttatatttttaccatcaaggaatcccaggctgatgcctagggaagtagccaaaacagggtggcacagaggaagtggctgatcacccatcttgattccacaaggctacccagagccttctctggcccaggaaggtccagggaagaggcccgtctagtgggcatgggagccatgtggataccttggagcttccaggtcaagaacagagatgggctatgttgatggaggtttgttttgtagcagttagaagtgagttggacctcacttttggcacagaatttccagtaaacctgcatttgtagtccttgggtatggacagaaactcacgccatcccaaagctcttagggggtaggttcatcttgaggcccagccagtaccccaatcctccttcctctgagaggcctggcctcctagagcagagcctctcaacctcagtactactgacattttgggctgggtaactggttgtgatgggggctgagccagacacggatggtgagaactccagttacctgctaaactatcacctcttctgaggggttttctagccacagtgactgcggaaggcactggcaagattctctcagtttcaccttggggaggaaacacttaggggtctgtggacagaattcaaggagttcgtgaatttagatagaaaataattacccctttacttcctcttactttcactggaagtggaacattttcttccatgatgattggaggtggcaaaccgcagaatcagtgacccccattaccaacagaaatcacatatagttcacagatatcatgcaaagtcttttaagcttaatactcccatgaaatcccaagacttatccaacccatcgctgggacttgttgttgatgtgttatgaagaatcacatctcttaaacgacatcacaactccttaaaaaaaaattctgggctggtcacagtggctcatgcctataatcccagtgactctggaggctggggtgggaggatcactagaggccagtagctcgaggacagcgtgggcaatgtgtgagaacatgtctctaccaaaaaaatacaattagctgggcatgatggtatgtgcttacagccctagctattcaggaggttgaggtgggaggatcgcttgagaccaggagtttgagctgcagtgagctatgattgcatcatcgcactccagcttagaagacagagcaaaaccccaaaaaactgggattaggagtttttgggaagaacgctatataggcataaaatcaagggttacataatatccacatccctgggggatactaatcttcatcatttggttaaagtggtatctatctgttcctccgctataaaacttctattttcccctttacctactctattcttcggaaatgagtcactaaatccagcccactctcaaagtaggggagattagtctccacctcctggggcagtggggagtgaagtttacatactttaaatggaattcttttgtaagaaagatttgcctgtttttcatttatcttgtgtatttaataataaaataaaaatgatcatttatttacttatgtgtttatttaagagatggggtcttgctgttgcccaggctggagtgcagtggcgggatcatagctcactgcagccttgaactgctgggctcaagcaatcctcctgcctcagcctcccaagtagctggaactacagacatggaccaccacacccggctaattaaaaaacattttttttgagatgtagttttgctcttgttgcccaggctggagtgtaatggcgtgatctcagctcactgcaacctctgtttcccaggttcatatgattcttctgcctcagcctcctgcgtagctgggactacaggcgtgtgccaccacgcctggctaatttttgtatttttagtagagacggggtttcaccctgttggccaggctggtctcgaattcctgacctcgtgatccacccgcctcggcctcccaaagtgctgggattacaggcgtgagccaccgcatctggctaattaaaaaaaaaaatttttttaagatgagtcttgctgtgtttcccaggctggtcttgaactccttgtctcaaacaatcctcccacctcagcttcctaagtagctgggattacagatgtgagccaccaaggctggccatttattattgatgtatcaatcaatcaatcaatgatttattttagtgtgactctctcgacagattatgtaagataaggacacctaggacactgtttgcctaagaaaggttcattctcctccctttctccctgcctcctggtctaggaatgacccgagaccttcttctttctccccgctaaccatttagcaagacaagtttaattggctcaagccaatttgggaggctgaggttggtggatcacttgaacttacgagttcgagaccagcctggccaacatgatgaaaccccatttttactaaaaatacaaaaaattagctgaccatgctggtgcatgcctatagtcccagctacttgggaggaagaggtaggagaattgcttgaaccccagaggtgagccaagtgagccaagatcgcaccactgcactccagcctgggcaacagagtgagactccatctcaaaaaaaaaaaaaaaaagtaaactgtgatcatcatagagaaatttgaagatacaaagaagtattgagaatatcaagattcccaaatcccaccacccgaaggtcagcttggtacagtgtcctccagtttttctttacttatattttcatatttgtacctttgagatcataaggtttacctccccttgattcctttttaaaaactcattttcccctcttatcatttcttcttttctagacagggtgagctgccactgttctccatgctgggaatgctgtttccaaaacatctgcctggcttcctccttctctgctcaaacatcacctcctcttaggaaccctccctgattggctgacctagactagggaaccatgcatcacttcttctctcgtgcagctttcgctctgttgcccaggctggagtgcagtggcatgatcacagctcactgcaacctccacctcctgggctcaatcgattttcctgcctcagcctcccaagtagctgggattacaggcgcccgccaccatgcctggctaatttttgtatttttagtagagatgaggtttcgccatgttggccaggctggtctcaaactcctgacctcaggtgatctgcctgccttggcctcccaaagtgctgggattataggtgtgagccaccatgcctggcctccttgatccctgtttaaaaacttgtttctcccactcatcattttttttgttttgttttttgacagggtttcactctgttgcccaggctggagtgcagtggcgtgatcacggcttattgccacctctgactccagggctcaagtgatcctatcctcctgtctcagcctcctgagtagctgggactacagatgtacgccactatgcctggctgatttttgtatttttgtttttttttttttgtagagattgggtttcactgtgttgcccaggctggcctcaaactcttgggctcaagtgatccacccatctcagactcccaaattgctggaattacaggcatgaaccactgcgcccagcacccccactcatcattatatggtgagcctttcccctgtatccttaatattctcccagcagacgatttttaatgatgacataatatgccatcatacggaaggaccatacggtatttaactgatctcctattgtcaggctttcaattgcttccagttttgttctaattttgtaaataactctgggatgcatatcctgatataaaccttcaacagcatcgctgattagttgagcttagatttcttcaaaaggcatttaaaccaggaagccaagggagaaaaacaagaaacgaatacaaaatctggaagggaatcaaacacatcctgtaggtgagctgccactgttctccatgctgagaatgctgtttccaaaacatctgcctggctccctccttctctgctcaaacatcacctcctctgagaagccctccctgattgcctgacctagactaaggaaccacccatcacttgttctcttgtgtagctttcgttcctattgggcttcccatagtacatacacatttgcttagtgtctcctgctttctgggtgattgattatttatcatgtttaccatttgcatctgtctctcctaccagggtggagattttagtctgtcttcttcgttgcagtgtctccaatcacctaatcattgcctggcacacagtaggtgctcaataaatgattactggataactgaaaggatgttaagagaataaatgtggtgccaggatcttacaaagggctgcctacccaggtgggaagcctctgcggtacacctgtgtccatggattccaagatgcttggagcgactgtctggactctccgttgatctcaactactagcttgttcagagctgggtaaatggagttggctggcaaggccacacccactggcttcggctccagcaccagtcatggaggacaaagatttccagacactctgcttgcctatggccaaacagatcgaggctcattctaggatagacccagggcagggctagcccaagggagatggctgggcacgaaggcagaacccaagagtgctccaacgtagcagctgtgtcctcctcagcagaaactcaaagatgggcaccttagcccctgcaccctggcattgacagacgctactcgttgttttaggggtagagagaggggttatctcactttgggaagccccagacaagagttcacatgcaagtcgttttatttaggaggagttataaatggaattacgtcctcctgctacacacacaaaaatgtttaagtcctaaccccctggtacctcagaatgtgatcttatttggaaatagggtaattgcagacgtaattagttaaaattaggttggactggagtagggtaggttctgatccaatacaactgatgtccttctaagaagaggagaacacacacagacacacgaagggaggatgcttttctttttctttttttttttttttttttttttgagacggagtctcattctgtcacccaggctggagtgcagtggcatgatcttggctcactgcaacctccatctcccgggttcaagtgattctcctgcctcagcctcccaagtggctgggattacaggcacccgcccaccacgcctggctaatttttgtatctttagtagagatggggtttcaccatgttggccaggctggtctcaaactcctgacctcaagtgatctgcctgcctcggcctcccaaagtgctgggattacaggcgtgagccactgtgcccgggctgggaggatgctattagatgacagaagactggaatggagaatgaaggctctagaagccaaggaatcccaaagattgtgggaaaccagcaaaagccaggaagaagcaaagaaggatcctcccccggaggcttttgaggggcgtgttgtcagctctgctaacatcttggggttggacttctggcttccagaactgtcagaccataaattcctgttgttttaagctactcagtctgtggtgcttcattatagcagccccaggaaataaatctaaaagttcatcccaggaaataccagacagggaagggaaggtggcaagtgaagggtgtgtacgtgaccaggttaaccctgcgggcaaccagagcctgatcccactggagagatgcagggcagagcaaaacgcccgacagggagggagctggggtatttatccactgacttctccaggcactggatgggggctgctcctaggggttgtccatgcaggccaggtgatcacagcagccccagagagaggcagagagtgacagctgattgcagtataaggcatccccgtcctcaaggaaccttggtcttctgacccagggtttcctgacagaaaccttactgacatttgggcctggatcattctctatggtggggcagaggtgggggatgctgtgcattgtagaatgttgagtagcatccgtggcctttacccacttgatgccaatagcatcctccttcttcccatccagttgtgacaaccaaaaatgtctgcagccactgccaagtgtcccctgggggcagaaatcatccctgggcgagaagctgtgttctaggttcacattaaggccaaatcattgcatgggctgctaaccaaaggacgagggtgggatgtaaatgtgtggaaagtgctagaaagctactctgagttagtggttaatagcagggccagcgaggggaataaagtaagacctctcacacctcactccacttcctcaggcactgctggagctgttctaatgaaaaattcatgcacatttctaaaaggaacaccatgcagggtggggaatttgacttacacggaggtcaccccgggccaggatcagttctaaacacttcatgcgaatccaccttacttagtcctcgtgccttgtgaggtgggactatgcttctcttcgttttgcacatgtggaaatagtggcacagagaggccaagcaccttgccgaaggctgcacagcaaggaagtggaagagtcggaaggaacccagacaggctgacacctgagtctctgctcttaaccactcagtttgtgtccccagaggtggcttagctctaagcttagaggcttccaagggaaacacccattggacaatgatgtttataaccgagccctctggaaattcatgcttcctgtcccaccactgggcacgcccccagcatcttaatctgaacccccagacgctttctctggtcatccaaccctgtgacatatcccttttttatgctcacaatttttttcagctcccattccccactcccattctctccctgagttcccagccttctccatttcccagtctctttccctctcaggagggttcatttcctgctggaacctcctctcacaccagccttgcaaagtaaaaacctagaacccacaaaaattccccagtgagttttggccaattgggctgaccctttgtccaagctgtttgcaggtgacggccaagagagggcctgagctcggatctgctgcatgttcccagagatgctacactcagacgaggttttcatgcaaattagaacaccatgtcccttccccacatccttttttctgtcaataaattatcaggataacagtagaaatcgtatgttgtctatgatatgaatgacattcttgtgcagtgcgtgacaggcgcaactgttcatgtggctccttttgctgcctactcccaactaaaacgggcctttgttgatcaggattacaaggatgagtttttgcaaatctccctccacccacaagtggggaaattccttaacccatttatgccggaggttgcaatttttgtgtgtgtgaaaaatccgaccttagtgatgaccttgagcagcaggatgtaaataactcccacaggattagcattccaataatggaacactaggcataaatgggttgttaaggaacatacactaggaccaagaggaaagttcagcttctctatgtacaggaggaggaagccaggtattgctcccgggtcaggccaaccgctggcctaaacttcaatggtaatttcagcccttagggcaggtgaagaggagacctccactggtcaacagagctgtgtgtatggagcagccccagggtgctctatggggtcactacagttgtggcatccttgtgtttgatcctgaatccttggctctgccccactccagctgctgacaagtgacctgcctggggactgcttacctgcatagtaggtgagggaaggtgaactgtggtgaggacagagtggggtttaaaacttgcacacctaaatatctatcaaaattataaatgcatttaggctgggtgcagtggctcacacctgtaatcctagcactttgggaggctgaggcaggaggattgcttgaggccaggagtctgagagcagcctgggaaacatagtgagaccccatctctataaaattgttcttaaaaattagctaggtatggtggtgtgtgcctgtggtcccagctactcaggaggctggggtgggaggatcacctgagcccaggagtttaaggctgcagtgagctatgattacaccactgcgctccagcctggacgacagagggagaccttgtctccaaaaaaacaaaacaaaaatcttccccaaaaataaaattataaatgcatttagtctttgatcctgcaatcccacttctgggaatggagaccctccaaccccctagctatatctgcaaaagtatgaagaggtacgtgcaacatgctcctggcagagcagcatcatgttccatgtcagtggacaggaagccagtcaagcatttctcttaatggcaaacaaataaaactatgggcagccacacaatagaatgctatgcagctgtgcaaaagaataaagaaggccaggcgtggtggctcacgcctgtaatcccagcactttgggaggcagaggcgggaggattgcttgagcccaggagttccagacctgcctgggcaacacggaagaaccctgtctctacaaaaattagctgggcatactagtgtgcacccgtgaagagactgtccatgtcctgcagtggaaagatctctagaacgtgtggttatgagaaaacaaaaatcacagaattgaacagcatgtatagaatgctactccttgggataagaaagaggggggaggacatagattcgattatgcttataattataattgcataaataaacattggaaggatattctgaggaactaaaggggttgcatattgtgggaagaggaagtagcatgcaagtgggggcagggatacatctttccagaaacatccctaacatttttaagatctagggcaagagtacaaaagcagaccacatactacggggaaatattgaaaaggtaactaaataaaacatgctgtgtgcttctactttgcaaatataccttcctttacactttggaaggtcagggtggaatttagaatccggatatctgcactgggtcaaggtgtggggagagccagccctgtcctgtccctttctcttcttagtcatggctctgtcctgccagaggggctccacacatatgtgtgggcattccagcttgtacatccaagctctggccacatttgtgttaacagccacccctcggatgtccttggccctcagttgggttacgaacagatccatatgagaattgcacgcaagttcatggaatctggccatgggcagggaattccaggatcctggtaacttaaaacatggcctacaaagtggggcacaagctcttggtagacacatccccttggctccaggaacttctcatcccacggggagtggtatggctggagaaggactgggtgagcctcagggcagggacccctcgcctacgtccaaagatattactctatcttttatctgtgttggtttttggatcacataacctttccgtattcaaaaatctaaaattatatctaaacacttgcacaatgaaaaatgatgttgcatctgggggccctccagacttctatgccctatagttagagttctgctcatgagcccctgtaatcttcaaaagcctgagcctcaggccagcttcagtggggctgtgttgtccttgggctgcctttcccagctcagggtccctccattgcagccttggagtctcactggtcccaggaggccacctccctgagactctgattgtccacacacactgtcccagcatcacttacattgtagaggagatcagtccacccttccatggttatgcactggaaaacagtcagcactgcaaacaggatgttgtcgaactgagtgatcccgttgttgggcccttcccagtagggctgacatttggtcccattggggcaggtgcgggcgggctcttctgtcccacatggagccggagactcaccctgaatgtcatctacaaaagggaaggggagaaaagtcaggggaaggagcagggaaaaccagctctgagaaatagggaccagtgactctataatgctgttggaacgaataacttttgggacaaacgtgatcagtcttcaaagagatcaatgtttggctttgggggtctattattggttttctattgattaatttcttctctgagctttactacttttctctttatgttttccatgagttttttttttttttctattcttttcctaaacttttgagatggatggattaactgcctttaaggctataaattgcctttaagtgtggctttacctgcatctcaacattttgtcatgcattatcattattgttcaagtaaaatattttctaatttccattattatttcttctttgacctatgggtaatttagatgtatttgttttttaaaaaaacttattaggtgtctgtgtgtgtgtgtgtgtatatatatatatatatatatgaagacagaggggagaggaagacagggagagaacggggggagagagagagcgagagagaagtataaaacaatataatgattcaccatgtacctatcaccaatttagacacttacctatttacttctggcaaattttgtttcatctattcctctgtatcccctccaaacactttgccttgccactagaatttttttttttttttttttttgagacggagtctcattctgtcacccaggctggagtgcaatggcatgatctcacctcactacaatctccgactcccaggttcaagggattctcctgcctcaggctcccaagtagctgggattataggtggccaccaccacacctggataatctttgtatttttagtggagatggggtttcaccatgttggccaggctggtctcgaactcctgacctcaagtgatccgcccgcctcggcctccaaagtgctgggattacaggcgtgagccactgcacccagcctagaatatttttaaagcaaagctcagacatcatatcatttcatccataaatgagaggcatgtctgttaatctgcaaacacttttagagttctctttttgttactgatttccagcttaattgcattacggtcagaaaatatgttttgtatttgtatttttttcagctttttgacctctgttgagacaaactttatggtccataatatagtcagttttagtaaatgtgccgtgtgcatggtgtagctggtaagtgcagccttcttccgacatccattaggacaaatttgtcaagcgcattgtgttattctcctataagccttgctgatttttttcttcttgggatgtactgggctcagggagctgttctgggggtgagggacaccagtacacacagttcctacccttgcctaagggtaaggaacaggagctgagctttctccccaaatagcaggaggcaggctgtgaaaatgccacaaggagagagaaacgtgccaacagacaccccttttgctggaaaccaaagacagcttcctggggaggtggcagtcaggctgaacgctaaaggtcagtccaaatcttaaggtattgatggggtagggaggcaggaaagctcacatctgggagtgtcctcattttaccagcacagcgggtctgagaggaccttattctgtgagcgatgcttttgaaggttttcaaagacgaccgtggcattgtcggacaagaaaacaaacagctgagtgtgtgtaaactcaagcttcctactcaacaaaaatatctctcaatgtatgtgctacagacttcgcagcaccaattctctgctcccttgactgagcacacagcagagggaaataaaccaatgctgaatgaatgaatcttgttggcctttcaagctctggctgaatagaaactccaagtctagcctcgccatgaacttaagttgttggaaacgccttcctcacttatgctggacttggtacatgaactattatttgataaatacaggttggaaggcaaaaatcttttaaacataaggctcagggcagagaacaaaataaatccatgggttcctataataaatgagaactatcgtttagcatggcacctgtgcctggaatcttctctgtctccacgccatgtccaagtctggctcaattcccaccctccatgtagcctctttgtgtagcccagttaacacagccccagtccctccctccctcccttccttccttctttccttcctctctctctttttttttttttttttgagacagggtctcactttgtcacccaggctggagtgcgggcaccatcatagcttactgcagccttgcagcctccaattcctgggctcaagtgatccttcttcctcagcctcctgagtagctaggactataggcatgtaccaccactcatggctaatttttaaatttttttattttgagacaaaatctcactctgttgcccaagctggagtgcagtagcgtgatctcggctcactgtaacctctatgtcccaggttcaagtgattctcctgcctcagcctctcaagtatgtggtactacaggcacacgccaccatgcccggctaatttattttttttgtatttttagtagagacggggtttcactatgttggccaggctggtcttgaactcctgaccttttgatccgcctgcctcggcctcccaaagtgctgggattacaggcgtgagccactgcacccggccaatttttaaatttttattttagcagagacagggtctggctatgttgcctaggctggtctcaaactaacggcctcaagggatactcccacctcagcctctcaaagtgctgggattacaggtgtgagccactgcacctggcccctttcaggcatacaatagctactgaattttcatatttaggggggcgtgggtataatcacacattagccttcactgttaaaaatggctgcaaatgaggggtcttgtttcctctaactattttggaagctcttagaaagcaggaagccttccactttatctttgcttccttctaagcgattggcacggtgctgggcacacaggaactgggctcccgacactgaggaatgctactgaaaacgggtctatctttagcagctttgcaatccccctcaaccccccaaccaccgacacgaaacactctgagcgttgcttctagaaaaacaagcgtccagagtgtctgaggaattcggttataaatacattttaaaattaacccactgcctgggtgtctgtatatatctgtctcttactcacacgtcttatatttttaatcgtgagctagcttttcagtctttctcctaaatcgaggcttcctcccctctggtggcaccacccacatctgtcccctcaaaaccccactcggacccaagccaaccccatggcctcttctcctttagctagtctagggtagaaaaacataaaataaaacttcacagaaacctaggatccaggagtcctggtttctctgctcacggctgatttttccaagaggccctgccccatattcattctctctctctctctctctctctctcgcatttccgcctgggtgacgaggccaggagcagaaatagctctgcctcaattaacaccttcttcatcggggaaagaaataattaggacattccatattgagcaaacttcacaagcccaggagagaaagagacaggaggagcaagagaaaaagaggaaaaaaaaaaccaacaaaccaaaacccacaaaaaaacccaaacctccaaccattgcaaataaaccttccccagtgggttttccctccccgtggggaggagtggggagggagggctcaggggctgcctctgcggatccacttgggggtcactgggtggagagggtgggtggaaatccactcccagacagaatcttcttctgtggctgcctttcccaaataaggggcctgaaacctctttctctgcccacctgggttcccctttgggcttcttgattccttctatccactccttcaattcacagctcccttgacccaaatcatcagaaccagaactgctattcagtctgtctgcacccagatggccagtggtccaaatactgaaatactgaaggcatcccttcctacttgattccatttcattctggagctttagagagcaagcagctagagtttggatggcaaagatttaactgaaaacgtatccaagggctatttggttcctgagtgtggatcgtggtggacacactgcttccacactgctggttcagagctgagccctgggagagtgtctctgcgctgcctggcttttccggggctcaccctacccccagacccagccactgaagggttaatgtgggcatagtcagggaggggcagaatgctgctgagtgctaggttctgattggttggtgccaggactcccaattggggtatctctggtacatcctgggggttgggggagaccaggaggactcatccagtactctcacccagcactcagggcagagaacaaaataaatccatgggttcctataataaatgagaactatcgtttagcatggcacctgtgcctggaatcttctctgtctctcaccttccacaaggtaccactcacaatgcattgaggcaataacccttttctggcccaactctccccacttcttgcttgctttagaagtcaggactggtcgaggtctgaaagcacccagaatacctgttccactcagccagatgtgccaggcattaattcccactctaggagcagtcctcaccaatgtcaaaaagaagccagtgtataaataccccagctcccttgccccttggctgggacggctctgaggtgtgtgttctttttttatttatatttttatttatttatttatttgagatggagtctcactctttcgccaggctggagtgcagtggtgtgatcttggctcactgcaacttctgcctcccgggttcaagtgattctcctgcctcagcctcctgagtaattgggactacaggtgcctgccaccacacccagctaatttttgtattttttagtacagatggggtttcaccatgttggccaggatggtctctgactcctgatctcaggtgatccacccgccttggccccccaaagtgctgggattacaggcgtgagccaccgtgaccagctgagttgtgtgttctttgctgtctcccagaggtgcccagggggatccagtcccagttttaagtggtaacccgcttgatagcacactctttaaaagatcccttctttctctgctcacttcctcattcccccgatggtgcttcctgggatcattcccaaataaactctttctctgctgggtcaccttctgtggaaccccacccctttcaacagctaagatctcagaggctatttcactcactgcctctcctgtagtgctctctgaaggagacggtcctcccagctgccaggagaaagaagcacacccctgcctaatcctcccaagagcttgtccctgaaggagaaaactggaaagatgcatcatgctccgtggacctacctgtcccctcttcaaagcaggtggtatgaaattttcccatataaaattctaaccctatgattgcaaaaataaggattgcaaaaaataggaggaggccgatctgcagcaaagggatcatcgccttcatgatcgacttcaggacgacttgtaaacctggggggacacagagagaggccccataagcccatgagcaagtacccccaaaccccgccaccaagacgcccaggtctctcccagacaaagcaggtgtgttcctgagggaacattaagcacccaggagcctggggattgggcaatggtgaaggaagcaccacacggaggctgatccttatcatgggaacaacacttcctaggttttttttttcctttgagacagggttttgcactgctgcccaggctggagtgcagtggcacaatcacagctcactgcagcctcaacctcctgggctcaggtgatcctcctgcctcagtccctgcaatagctaggactacaggcatgcaccaccatgcctggctaagttttaaaacttgtttgtagagatggggtcttgctatgttgcccaggctggcctgaaacccctggtctccaaggactcaaactcctcagcctcctaaagtgctaggattataggtgtgagccaccatacctggcccctattattattattatttattttatttattttttttgagacagagtcttgttatatcgcccaggctggagtgcagtggtgccatctcggctcactgcaagctccgcctcccaggtttacgccattctcctgcctcagcctcccgagtaggcccagctaatttttcatatttttagtggagacagggtttcaccgtgttagccaggatggtctcgatctcctgacctcgtgatccacccgcctcggtcttccaaagttctgggattacagacgtgagtctccacgcctggccttattattttttaaaaagcacttttaactttaaagtatttatttatttatttattttaattagccaggcatgatggtgcatgcctgtagtcctagctactctagggactgaggcaggaggatcgttaaggctgcagtgagctatgattgtgccactgcgccccagcctgagtggcagagcaagacgctgtctcaaataaatctatatatatattttatagagacagggtctcactatgttatccaggctggtctcgaactcctgacctcaagcgatcttccagcctctgcctcccaaagttctgggattacaggcatgagccacagagcccagccaactttaaagtacttaataaaggtatttgacatgctgttccatttgatgatcttttgggcaagaaaggggtgggagtccattgcttttggagccatattcctgggtgttgggcaacttgcacccagaagagggagccattttcttaattttttttttctgccaagaggcggtgtcttttcctcattcataaaaggccgccatataggctagttgctgctctgggtaggaaagcggttggcggtcccaatttcaaccccaaggaaccagactcaacattatttcactggcttctagtgacaagcccctgaggtggccatacatgtaaagtcactctcattttacagaagtgggaagcaaggctaacagagatgctgtgattcacccagagaatgcatgagaaatggcagaactaggcagggcgcggcggcggttcacgcctctaatcccagcactttgggaagccgaggccagcggattaacgaggtcaggagttcaagacaagtctggccaacatggtgaaaccccatctctactaaaaatacaaaaaattatctgggcatggtggccagcgcctgtaatcccagctacttgggaggctgaggaaggagaattgcttgaacttgggaggcagaggttgcagtgagccaagatgacgccactgtactccagtctgggtgacagagcaagactctgtctcaaaaaaaaaaaaaaaaaaaaaaaaaggcagaactaggatttgaacccaggtccatctgaaatgaagccccatgtttgcccatgtgctgatgttgctttctctgttctgagcaacccaattcagaaagatggtggtgaataagaaggcagggggccaggtgtggtggctcacgcctgtaatcccagcactttgggaggccgaggcgggcagatcacgaggtcaggagatcgagaccatcctggctaatatggtgaaaccccgtctctactaaaaatacaaaaaaattagctgggcgtggtggcgggcacctgtagtcctggctactcgggaggctgaggcaggagaatggtgtgaacccgggaggtggagcttgcagtgagctgagatcacgccattgcactccagcctgggtgaaagtgcgagattccatctcaaaaagaaagaaggcagggaacagtccccgaagggacacagtggaacagaagacacacccaactgggcatctgaagacctaaatctgggggtattgtcatcaatcagggaccccatgcaagctcttatcctaccaagctcagcctccagtagcctctcatctaacaaatggttcattcatggcggctgaattactctgggcttcaaatccttttgggagaggaaggggttaatactgaaattcgcatcctgcactaaaagttccactgttgtaagactcgaagaatgttaataataataatagctggccaagcgtggtggctcacacctgtaatcccagcactttgggaggctgaggcgggtggatcacttgaactcaggagtttgagaccagcctgagcagcgtggtgaaaccctgtctctacaaaatacaaaaaaattaactgggcatggtgctgtgtgcctggagtcccagctatttgggaggctgagatggtaggattgcttgagtctggggaggttgaggctgtactgagctgtgattgcaccactgcactccagcctggcgacagagcaagagccttagttagtatttctctgcctatcattggcttttttttttttttgagatgggcttgctctgtcacccaggctggaatacagtggcatgatcacggctcactgcagccttgacctcctgggcacaagcgagcctcctgcctcagcctcccgagtaggtgggactacaggcacacttcaccatacctggttccactaccatttttttcttgaggctattaactcaggtctgaacgatgacaacatcctatgtttgtaaccactatggtatctactaggaaagtctatgatcaaaatgaaggttcaaacatatagcctgaggctttgcttcttgattgcaggaacttcccatggctcttgatgggtggagaccacagtaagagagggaagctgtcaggatagctcgaggggccatgccactccaagggcttaaaaatgtaatgtgggtgctggccgggcgcggtggctcacgcctgtaatcccagcactttgggaggccgaggcgggcggatcacgaggtcaggagatcgagaccatcctggctaacacggtgaaaccccgtctctactaaaaatacaaaaaattagccgggcgtggtagcgggcgcctgtagtcccagctactcgggaggctgaggcaggagaatggcgtgaacccgggaggcggagcttgcagtgagccgagatctcgccactgcactccagcctgggcgacagagcgagactccgtctcaaaaaaaaaaaaaaaaaaaaaaaatgtaatgtgggtgctaacagatgcagtgtggtgcagtggttaaggtgctggatactcttggtgtctggccaagatcccattttctttctggtgtacccgccctccagctgctatggatgttggttgctaatgcctcccagctgcctctcttcttagtagaattgcccttggtgatcaaaagctatctcacctgggagctactgcgtctctacctcccatccacagtgactgactatagaagtacaaaaggccggcatccttgccatgcattggaggacaactctggtgtcacacacactccagctgaaattgcgtccctgctctatccattccccagccccaccctgctgatctcctgctgtctctcccaagagccgtcccccaataaagcaggtgcatctgaacacccacctaagtatccgcttcaagggaacctgacctagtcatccacttactagtgaattccaaacctcagcttctccatctgtaaatggggactgcaatagtacctccctcatacgattagatgagagagttcacacacagtgaagtacctggtaagtcataggtggtcattaaacagagactcttgttactactgctattataatatacatatattttttgagacagggtcacactttgttgcccaggctggtgttgaactcctagcctcaggcaatcgtcctgccttggcctcccaaagtgctgggattacaggtgtgagccactgcacctggctcttttgactattagatttgggatggcccttaatttaatatgatgcaggcatctgctgggatcttgcagagaccttggatagaagtgtcttctttctacaaaaagatcctgctggtgatcctctgggaaatcttactctttaaacctgggtagcaatgaaccggaagaacgaagccaataaaatgtaaaatggtgataataaaagagactacttcacaggcttgttgggaggataaaggactttaaaaaaatggaaatacttagaataatgtctggcacatagtaagtgctttttaatttttttttttctttttttgagacggagtttcactctttcatccaggctggagtgcagtggcgtgatttcagctcactgcaacctccgccccccgggttcaagtgattctcctgcctcagcctcccgagtagctgggattatagatgcccgccaccacgcccggctaagttttgtatttttagtagagacggggtttccccattttggccaggcaggtctcgaactcctgacctcaggtgatccacccatccaccttggcctcccaaagtgctaggattataggcatgagccactgcacccagcctataaattgtttgtttttaaactttttgttgtctgtttttttgagacaaggtctcactctgttgtccaggctggagtgcagtggtgctatcacagctcactgcagccttgacctcctgggctcagatcctcctgcctcagccttttaagtagctgggactacaggtgtgcaccatcatgcctgctaatttttttttttttttgagacagggtttcgccatgttgcccaggctggtcttaaaactcctgagctcgctctatctgcccgcttcggtctcccaaagtgctgggattccaggtgtgagccactgtgcccagtcaacctggctaatttctaaaaaaaaaaaaaaaatttgtagatattggcgggggggtgggggtggtgttcctcacaatgttgcccaggctggtctcgaacttgtggcctcaagtgatcctcccaaagtgctggaattacaggcatgagccaccatgcctggctaaattattattattaaccaagacaagaagatagaaaaaggacagccctgttttatttttgctttttacatttttttttggctcaacctacacttaatcttgaccctgcatatggcagccacccttaaacggggactagatgtatctgtggagaatgagaaagcagcaaggaatgagtatgaattttagagctcattactgtccactctaagaattcaggtgagtaatttaacctccttaagcctcaaccgtctcatctgtaaaatgggtgttcgctgggtgactgtgaggatgaaataaggtaattcatgtaaagtccttctgtagtgccctgcacgcagcaggcactcattaaatgggaatggtcattgccaccagtggtacggcccaggcttggagtcacacttgctcactcctagttctgccacttctcagccacaaaaccctgctccaatgtttcagccactctgagcctcagtttccccctccataaaatagagacatcagtcctatcaacttcatagggctgtgagtactgaatgagatcacacgtggtgcttagcatggctcccgatagacagtaggtgctcaataaatgggtgtggctcctagtttgctttcaggagctcatggggagctacagtcatattcctagggggttccctatagggagtcccaaagaagagactgccctcacacaggctggtggcaggatgtggcctcctgagatgctctgcataggggaaactgagggctcctggggcccgtgagcaaaccccttgtcagggtcggaaactcacgcacttgggattccagacaccagcttgagcggccgcagcactcgaactgccctcagcgtccgtaggtcaaactccgtcccaactgtcgccaagatgctgaaagaaagaagccagaatggagaacagagggtgggttttgggggtcagacagcagggcgggggtgcttgggattccaagctgtcctgtattggttgggtgaccacaggcaggtgactcgacaccactggcctcagttttgtcacctgtaaaatggtcttaacagtacctgcctcacgggataaaaggtgatttacgaagacccccaacagatggttcatgttgcacaaatgttgcaatgagagaaatggaatcttccccatggctcaaggttggggtgacattcagtatatttcacaacctacaatgacaatagattgtggggtggcctggggccctgggggaatggcagacctttcggggtttgtggctctttattttattttattttatttttttgagacagagtctcactctgttgcccaggctggagtgcgatctccaatggtgtgatctcagctcactgcaacctctgcctcccgggttcaagggattctcctgcctcagcctcccgagtagctgggattactacgcacccgccatcatgcccgggtacttttttttgtatttttgtagagacagggtttcaccatgttggccaggctggtcttgaactcctgacctcaggtgatccacccgcctcggcctcccaaagtgctgggattacaggcgtgagccatggtgcctggcctggtttgtggctctttaacaaatggcaggaaagtagttcagtgttaagagcccagcctgcatgggttcagatcccagatctgccactttccagttgggtaaccttgggcaagggacatccctgctctgtgcctcagtttcccccttttgtataacctggataacaatagtatcaatacctccaagggttgtgaggattcagtaagttgacaaaaagtggtcagcacaatgccaggcacacaggttaccggtatgctaacctattcagaaataaataagaaaacaaaaaaatgggtgtgatcctgcttgtgtggaccagccagcatcagctggctagaaggcagctacagaccccaagcctctggtcaaaaagagtcccttttgtaaatgcaagttagtaaggatgatagcagtaggtgggatgaggcttccatagaaaccctccgagcaagaccctgtcatgagacctcatttgtaaaagtattgctgttgaaacacagggtcccacctggccctgtttcctgaacatgtccatttcagagctaagtgatgtacagtgcgtggtcaaggcacaatacaataaaagagactgtcatcagaacttcatataatggacaagaaatgctgaataccagagggtctgtggttaatggaaggttggtcacagcaaataacttggggatttttcagtttatttttattttagacatggggtcttgctctgatgcccaggctggaatgcagtggtgcaatcatagctcgctacagcattgaactcctgggctcaagcaatcctcctgccttagcctactgagtagctgggattacaggtgggaaccaccacatctggcttgatttttcagttttatccaggggcttgggtcttaacacttcagtctgtggccaactggtatctgtacctcttgccttagggctgtctccaaatctggggcaggcccagggaatgaactttaagggagcagccctcaaccaaagattgctgggagttggtggatcaataccgcagctccctcacccttcattctggatcacttaagaggtgagttccacgtgggctcccagtaggacggagctcagttgcctacaggacaactcacccttccttgccccacctcccctctccttctccaacccttctggggtcacctctcagatgaactacttgcacaaggattgccctaaattcttgtttcaggatctattctgggtcatcctaaactaacacaaagcaagttcccaactttttttctcaagattacccctagaggagagatgggcatattaggttgggctgaccttttccaccatccacaagtgggcgtctgagcgtatcctatgtgctgggtagagtgacatatgagactatccctgccccatggagctgatgcagaagagaagtggttaagaaaaacatgcacacaatgagtgaatctgttgcaggtgtgatgccttctcagctaggaagacaatggctttgaggggcacacagcaggtcgtgttaactagtccagggcctgggataccccctacttcaagtcaagttcccatagatgagggggagaaatctggccagtggggaaagaactttccaggctgagagtggccatgacagagagcttgggactgaaagagggcttggcaaattcaagaaatgacatggtgtcaccactgggatttggatggtgaggttcaagcagcaagtcatgaagccagagtaggcaggggccatgacatacaactttacaaaaaatgaatttatttatttttatttttggagacagggacttattctgtcacccaggcttgagtatagtggtgcaacaacagctcactgcagcctcaacctcctgggctcaagcgatcctcccacctctgcctcctaagcagctgggactacaggtgtacaacaacatattcagaaaattaaaaaattttttttgtagagatggggtcttgctatattgcccaggctggtctagaactcctggcctcaagtgatcctctcacctcagcctcccaaagtgctgggattataggtatgagctactgcacttggcccattcaacttttaatttgatttactttatttttctcttctcctcccagctttctggtactaatttgggttcctcaaattctgacttagagatcactattctcttcttgcaccttgttttcttctgtgctggcacataaaagctgtcagggcatgaacagcaaagaacaggcagtggttaagtccttagtatttcacttcacaaacatcaactgagcactaataacaagccaggccctatctctgtgtgggggagactgagagtaaacccaataaatataagcaggctttgttttgttttgttctagagatggagtctccctgtgttgcccaggctggcctccaactcctgggctcaagggatcctcttgccttggcctcccaaagtgctgggattatggacgtgagccaccacaccggccgaggaagacttcatttcattgtgctttgctttattgcaatttgtagatattgtgtttcttacaaattgaagatttgtggcaaccctgtgtcaaggaggtctatcagggccattttttttccaacagcgtgtgctcactttgcgtctctgtgtcacactctggtaattcttacggtatttcaaacttttacataattattacatctgttatggtggtctgtgatcagtgatctttgatgtgactatagtcattgtttgggggtgccacgaaccacatccatagaagatggcaaacttgatcgataaatattgtgtgtgttctgactgctctaccaactggccatttccccatctctcccgctttccttgggccttcctattccccgagacataacaatattgaaattaggtcagtgtataactgtacaatggcctttaagtgctcaagtgaaaagaagagttgcacgtctctcactttaaattaaaagctagaaatgattaaacacagtgaggaaggcgtgtcaaaagctgagatagggccagggatggtggctcatgcctgtaatccgagcattttgggaggctgaggtgagaggatggcttgagcctaggagtttgagactagcttgggcaaaatagggagaccctatctctacagaaaataaaaaaattagctgggtgtggtggtgcacacctgtggtctcagctacttaggaggctgaggtgggaggatcacttggtcccaggaagtcaaggctgcagtgagcggtgattgcaccactgcactccagcctgggcaacggagtgagaccctgtctcaaaaacaaaacaaacaaacaaacaaaaggccataagctagaggttagccaagttgtgaatgcaaaggaaaaattactgaaggaaattaaaagggctactctagtaaacacatgaatgataagaaagtaagacaggcttcttgctgacatggagaaagttttagtggtctggatagaagatcaaaccagccacaacattcccttaagccaaagcctaatccacagcaagcccacagcaagactgagagaggtggggaagtgcagaagaaaaatctgaagctagaagatcttggttcatgaggtttaaggaaagaaggtgtccccataatataaaagtgcaaggtgaagtgataagtgctgatggagaagctgcagtaagttatccagaagatctagctgagattattaatgaagctggcaacactgaataatagatttttaatgtagatgaaatgccctattggaagaagttgccatctaggactttcatagctagagaggagaagtcaatgcctggcttcaaagcttcaaaggacaggctgactctcttgttaggagctagtgctcctggtgactttaagttgaaaccaatgctcacttaccattcctaaagtcctaaggtcttaagaattatgctgaatctactctgcctgtgctctataaatggaacaatgaagactgaatgacagcccgtctgtttatagcatggataactgatattttaagcccactgttgagatctactcagaaaaaaatatatatataatatataacacataatatatgttatatataacatatgagatatataacacataatatatgttatatataacacactacacatatgttatatatgatacactacacataatatatgttatatatgatacactacacataatatatgttacatatgatacactacacataatatatgttatatatgatatatataacacaatatgttatatgtgacatatataacacataatatatgtgacatatatacacataatatatgttatgtgtgatatataacacatgttatatgtgatatataacacatatgttatatgtgatatatataacacatgatatatgttatatgtgatatataatttatattacatatatgttatatatataatttatattacatataacatgttatatatatatatgtattttagatgaagtcgcactcttgttgcccaggctggagtgcaatggcacgacctcagctcactgcaacctctgactcccaggttcaagcgattctcctgcctcagcctccagggtagctgggattacaggcacctgctaccatgcctggctaatttttttgtatttttagtagagttggggtttcaccatgttggccaggctggtcttgaactcccgacctcaggtgatccacacgcctcggcctcccaaagtggtgggattacaggtgcgagccactgtacccagccagaaaaaagatttctttcaaaatattactgctgacaatgcactggttatccaggacctctaatgggcatgtacaagaagatgaatgttgtttttatgacttctaacacaacatttttttttttttttgagacagagtctcactctgtcgctgcagtggtgtgatcttggctcactgcaacctctgtcttcaagagggttcaagcaattctcctgcctcagcctcccaagtggctgggattacagtcatacgccaccatgcccagctaatttttgtatttttagtagtgatggggtttcaccatattgaccaggctggtcttgaactcctgacctcaagttacccacctgcctcagcctcccaaagtgctgggattacaggtgtgagccaccatgcccagccacaacattcattctgtagcccatggatcaagaagtaattctctatttcaagtcttatgatttaagggatacatttcataaggctatagctgccatagataaattcctttgatgcatctgggcaaaggaaattgaaaactttctgaaaagcattcaccattctagataccattaggaacatttgtggctgttccagtggctcatgcctgtaatcccagcacttagggagatcaaggcaggaggatcacttgaggccaagagttcaagaccagtctgggcaacatagtgagacctcaactcaattaaaaataaaaaaacaatccacaacaaacaaacaacaaaaagaacatttgtgattcgtgggaacaggtcaaaatatcaacattaataggaattttgaggaagtcaattccgatcctcatggatgactttgaggagttcaagacttcactggaggaagacactgcagaagtgatggaactagcaagagaactagagttagaagtggagcctgaagatgtgactgaattgctgcagcctcatgatcaaacttcaatgcatgaggcgttacttgttatggaagagcaaagaaagtgatttcttgagatggattctactcctggtgaaaattctgtgaacactgttaaaatgacaacatgagatttagaatatgacataaacttagttgacaaagcagtggcagggtttgaaagaactgactccaattttgaaaaaagttctactgtgggtaaaattgctgtcaacaagcatctcatgctagagaaatctttcgtgaaaggaagagtcgatggatgcggaaaactttcttgtcttattttaagaaaatgtcacaggcaccccaatcttcagcaaccacccccacgatcagtcagcacccatcaacactgagccagtgacccttcaccagcaagatgaggactcactgaaggctcagatgattgttaacttttttagtaataaaacatttatttatttatttatttatttatttattttttgagacagagtctcagtctgtcacccaggctggagtgcagcagtgcaatctcggctcactgcaatctcccccccgcctcccaggttcaagcaattctcgtgcctcagcctcccgagtagctgggcttataggtgtgcaccaccacacccggctatttttttgtatttttcatagagacggggtttcaccatgttggctgggctggttttgaactcctgacctcaagtgatccacccaccttggcctcacaaactgttgggattacaggcatgagccactgtgcccagccttttttttttttttttttaatttttgttgagagatacggtctcactctgtcccccaggctagagtgcagtggtgtgatcacagctcactgcagtctcaatctctcaggctcaagtgagcctcccacctcagcctctcatgtagctgggaccacaggcatgcgtcaccatacccagctatttttaaaaagaatttttttgtagaaacggggtctcactttgttgcctggtttcaaatccctgggctcaagcaatcctcctgccttggcctcccaaagtgttgggattacaagccactgtgctcagccttgatggattttaaaattaaggtatgtacatttttttttagacataatgctatcatgcacttaacagactatagtgtaagcataacttttatgtgcactgggaaaccaaaaaaggcacgactccctttattgcaatattcgctttgttatggcgacctggaaccaaaccagcagtgtctctgaggtatacctgtatgacagatgttagggcgatgagtgcttaggagaaagttaccacagagcaaggggaaaggacgcgtcagtgacatggggctggcgggatgaagggagtggtgacatttctatcagtaaaggcacctgctctttaccacctggaaggcaaacagttcagtgttaaaagtgttacagggccgggcgcggtggctcacacctgtaatcccaacactttgggaggccaaggctggcggatcacaaggtcaggagttcgagaccagcctggccaatatggtgaaaacccgtctctactaaaaatacaaaaattagctgggcgtggtggcgggtgtctgtagtcccagctacttgggaggctaaggcaggagaatagcttgaacccgggtgacagaggatgcagtgagcagagatcgcgccactgcactccagcctggtgacagagcaagatgccgtctcaaaaaaaaaaaaaaaaaaaaaaagtgtttagaccagcactgcccaggagaaatctattaagagctacttatgaaattttatagccaggtgcggtggctcatgcctgtaatcccagcactttgggaggccaaggctggcggatcacaaggtcaggagttcgagaccagcctggccaatatggtgaaaacccgtctctactaaaaatacaaaaattagctgggcgtggtggcgggtgtctgtagtcccagctacttgggaggctaaggcaggagaatagcttgaacccgggtgacagaggatgcagtgagcagagatcgcgccactgcactccagcctggtgacagagcaagatgccgtctcaaaaaaaaaaaaaaaaaaaaaaagtgtttagaccagcactgcccaggagaaatctattaagagctacttatgaaattttatagccaggcgcggtggctcatgcctgtaatcccagcactttgggaggccgacgcaggcagatcacttgaggccaggagttcgagaccagcctggccaacatggcgaaactccatctctactaaaaatgcaaaaaattagctgggcgtggcggtgggcatctgtaatcccagctactcagaggcagaggcaggcgaactgcttgaacccatgaggtggaggttgcagtgagccaagatcacaccactgcactccagcctgggtgacagagcgtgactctgtctcaaaaaaaaaaaaaaaaaaaaaaaaaattaaaatttgctagtagccacattaaaaaagtaaaaagaaacaggtaaaattcatttattggtttgtttgtttgtttgtttatttatttatttatttatttatttatttatttatttattttgagacagggtctccctgttgtctaggctggagtgcagtggctcaatcttggctcactgcaacctccgcctcctgggctcaggtgatcttccttcctcagcctcctaagtagctgggactacaggtgggagccaccaagcccagctaatttttgtattttttttggagagacagggttttaccatattgcccaggctggtctcgaactcctgagctcaagcaatctgcctgctttggcctcccaaagtgctggtatttgaggcatgagccactatgcccagcctgaagcattctaagaagatcgtagacctgctgggcacaaaagctcctgcctgtaatctcagctactcgggaggctgaggcaggaggatcgcttgaggccaggagttccagaccagcctgagcaacatggcaagaccttgtcgctattaaaaaaaataataacaattaaaaaaatgggcggggcattgtggtgtgtgcctgtaatcccagctactcgggaggctgttggtgggaggaccacttgagtttgggattttgaggctgcagtgagctgtgatcgtgccactgcattccaggctggaagacagagcgagaccctgtatcttaagagataaaagatattttgcacatggttttccttggaatctggtcaatattctacactttcatgtgtttcaactgaagtgctcaaaggccacatgtggccagcggtgactgtatcaaacagcacaagtgcagagaaatagacatttgaataaagactgggagaaagcaagggaagcaagagagtgagccatatgaatatgtcagggaaaactctaggcaaatggaacagccggtgcaaaggtccagctggtgcaaaggtcctcctcccgctctccccctcactcactctgttccagccacaccaattcatccgtgttcttcaaatgcaccaggctggaccgtgcatttaatagctaggccatgcctggtgtatttgagaaacagagatgagttggtgtggctgaagcagagcgagcaagggggagggtgtgaggggacgaaggcagtgaggtgatggatggtgcagggctttgtgggttgtggagaggactttggctttttctctgagtaaggtgtgagccatggagggttctgaggggaggagggatgtaatctgacttgtattaaaatatgatctctctagggggcaaggccggaagctgggagattgaggaggaggcaactgcattgacgcagttgaacgctgataagcctggaccagggaggttgtgctggatgcagtgataacgctaagacaaactccaccctgctttagggagagaccacaccaatgagtgagtgagagattcaactacaagtccctctgaccccagggatagaggaggcagggatgaaagagggaatgattacagcctggggacagcattatcgcagagctcatgtccggggaggcagcatagcacagtcagaacatctcagacgggttaaatcctggccctgcattttctcattgtgtgacctttcccattgccttaacttgttcaagcctcggaaatgcagataatctcaccaccctgtgcaatcccagctggctcccaagatgcattacctcacagcctcctccctggaaggataagaaggaattaggaggagaacaggaagataagggaggcttctctggctaagaaagccctatggaggcagaaggctccactcagggtatgtggtaggggagaggttgggtaagctggacagtggaggctgtcaactagaggctgggtcttgtcctgtggacagtgagagtcatgtaaggttttggagcaggaagggatgtgattagggttggcgttcagaagacaagcctgacagctgaaaggacagattggtggtgatggagcagaagttaggagggagccgcaagagcaggctggtgtaatgagggctggaactaggacaaaggcagtgggagtacaaaagaggccccggtttatatatagctgccattgattgctgtgctccagggagcctgcctgggctcatcaaatcctccctgcatcccagcggttggcagtttgaggcccattttacagaggaggaaactaaagaccagataagttaatcccacatggaggttcctaccactgagtaagaactcgaaccccagaccagccacaggactccagaatcccagttctctactgtgtcatccttcaactcctgtgactagttgggcggggtgaggggcaacggtggtgaagaaagagaagaatggctctggttctgaaaggaccacggagtgatgttcattcatttattcaacaaggatttagtgagcacgtactatgtgccagatattcagagagtgcctaaagatgctaccaaggacaaagcaatagtgggaaaagatatagtatgtcagacggtgtgaagtgctatggagaacaatatggcagcccctagggcttccaatggaaagactgagtgtggagcaggagagaggtatcaagggtgactccagggttttggcctgagctaactgaaggatgaagttgctgtcaatggagatggggaagatggaggaagaaggtttcaaagatcaagaactgggttgtagacatgttgagtttgagatgccagttttccgtcactccttagttaaaatcttccaatggcttccatcaggcttggagtaaaatttaaagtctaccatgaccacatgaccttgcgtgatgtgactcctgctgaccaccttgtcccacaacaccctggccactccgacttcctttctgttctgccagcaggaaaagctcactttctgctttattgagaattactatattggctgtctcctctgccgtccccattccttcaactctcatcttttgcctagctggcctcttcgaattcttcaggttgaaactcagattctgccttctcagagagaacatccctcaacttcctagctaaagagatcctgcctcttcactctctggaattatattgtttgtttgtttgtttatttatttatttttaagacaggatctcactctgtcacccaggctggcgtgcagtgcacagtcacagctcactgcggacttgacctctcaggctcaagcaatccttccaccttgtcctcccaagtagctggaactacaggcatgcattaccctatccagctaatttttaatattttttttgtagagacagggtcccagtacgtttcccaaggtggtctcaaactcctggattcaagtgatcctctcatcttggtctcttagtgtttggatgataggcgtgagccaccatgcctggccgtactgtttattaagtcgtatttattattcatgctttcttctagaatgtcagctccacgaggacaggggctttttttgtatagcatctttcatggcctagtgagtactcaataaatattgtggtgggtgaataagtgaggtgtggcagaggacagggttatggaagaccagataacccagggtagatgagtgaagtggaaaaagccaagggtccccagtggagagggagaagacacagacatgggaggagactggtgtggagaatggcatacctgacagtcaagttcaaaagcattttgaggctgggtgcggtggctcatgcctgtaatctcagcactttgaaaggccgaggcaggtggatcccctgaggttaggagttcgagatcagcctggccaacatggcaaaactccgtctctaccaaaaatacaagaaaattagccagccgtggtggcgggagcctgtaatcccagctacttgggaggctgaggcaggagaatcgcttgaacctgggaggcagaggttgcagtaagctgagatcgcaccactgcactccagcctaggtgatgagagtgaaactccatctcaagaaaaccccccaaaaacaatagcaacaacaaaaacacacagaaataaagtattttgagaaaggagaggtcactggtctccagggccgcacagaggtgagtaagagtaaaggatgaagaatgcatttcatacggcatcagggtcacgtcagtcttgcgggggctgatggttgagggagaacaagaggagaagaactggaaatgtgagcctgggtaggagaggagattttcagggtgggagagaactgaatatgggtcaagggagagaagttgatgatgtatctcttggcctttagagagctgcaccgcccaataaagtaaccactagccacacatggctatttaaatacagatttaaattcatttaaattaaatgaaaaattcgcttgtaccagtcacgttttaagtgctcccaagccacatgtggctggtgcatacatacatacttcatcagtgcagaaagttccattggactttgatgttctagcatgtccatccccgtagggcagatattttctattctttctttctttttttttttttttttgagacagggtctcattctgttgcccaggctggagtgcagtggcacgatctcggcttattgcatcctccgcttcccaggttcaagcgattctcctgcctcagcctcccaagtagctgggattacaggcacttgccaccatgcctggctaatttttacatttttagtagagacggggtttcaccatgttggtcaggctgatctcaaactcctgaccttgcgattcacctgcctcggcctcccaaagtgctgggattacaggcgtgagccactgcgcccggccttcttttcttttttagagacagagtcctagtatgctgcccaggctggactcaaactcccagtctcatgagatcctactgccttggactcctgagtaggtggaactataggcctaagccactgtgcctggctttgcaaaatttatttttattttttattttattttttagaaattttcatctgttttgttcatagcatctccagcacctaaagctgtgcctggcatacagtaggcactcaataaatgtttactgaatgaataatgaagcaaaaatgtagaaaagtgtggttgataattaacagagtatattctagaagaggtggaaggctcagtatttaaagaagagagtccaggcgtggtggcttatgcctgtaatcccagcactttgggaggctgaggcaggaggattgtttgagctcaggagttcaagaccagcctgggcaacataaagagaccccatctctacaaaaaatataaaaattagccggccatggtggtacactcctccagctgctcgtgaggctaaggtgggcggatcacctgagcctggcaggtcgaggcagcagtgagctgtgattgtgccactgcatttctgcctgggcaacagagtgagaccttgtctcttaaaaaaaaaaaaaaaagaagaagaagaatggaagacacagttgtccatccaagagccaccaccactacccgccttactggcagagcccacctcccatcaaagaggcagaaaatgcctaatagtctctttttcccaagattccttgcaataagagcacttgtcacatgacccattcgtaggcctaacaggatctgggtgaaaaatctgctgggtgcttctggaaaaggattttttccccgtgagatgagtcacatggtaagagacagcccttcctctccctcttctttggccggatgcttttgtgtctgtctacgtggatggctgggtaagtaccttagaactgaggcagtcatcggccgggcacagtggctcacgcctgtaatcccagccctttgggaggccgaggcaggtgcatcacctgaggtcaggagtttgagaccagcctgaccaatatggtgaaaccctatctctactaaaaaaaatacaaaaaattagccggatgcagtggcaggcacctgtaatcccagctactcgggaggctgagacaggagaatcgcttgaacccaggaggcagaggttgcagtgagccgagatcatgccactgcactccagcctgggcgacagagcgggactctgtctgaaggaaaaaaagaaagaactgacgcagtcgtcttggggctgtgagtggtaaatgttaaaaaaagtccttacagtgacgatgttagagtggaaagatggaaggactctttggagacattgttgagccaaggaaccaaccctgcaaccaacctcctggcctccagacttcttttgtttttgagacaaatctcactctgtcgcccaggctggagttcagtggtgcaatctgggctcactgcaacttccacctcctgggttcaaatgtttctcctgcctcagcctcccgagtagctgggactacaggcgtgcgccaccacgcctggctaatttttgtatttttagtagagatggggttcaccatgttggccagcctgttctcaaactcctgacctcaggtgatccaccccacccgtcttggcctcccaaagtgctgggattacaggcatgagccactgcgcccggcctccatttttattttcttaattgtagctaagtcatatcagaacctgctgattaaaggagccaatattcactaaatgtattctcttccaggttgtgtgcttgttactttacattctgagagctcattttatgctgcttaccagggacttgttctattctccctttcattgatggggaaattgagacccatggggttaaactacttgtccagctaacatgtggtgcctgcgtgctacgtctggttttacccattctaccatgctgctcctggttaactctgccaccccactcaccttccccactgggacctcagccaaactcatgccttcactagcctgagcatgggaaggaggtcaattctctgctggttggaagtcaggatgtcaataaatatttacagaggagcaactaccatatgccactcagaagagaggggaacatgtgcaaaggccctggggctggagagacctcatgaagagaagtgaggttaccagttgagaagtggaggcagaggacaggagtttgagcccaagagtttgaggctgcagtgagctacgtcactacagccagtgcaacagaatgacatcctgcctctaaaaattaaaacaaaattaaaaagatgacacagaggaatgtctgcaaatcagtgagaataacacagcaaccccaataggaaaacaggcccaaaatgtgaataggcagattaggggagtgagaaggagaggagacaggagagtgagaagatgttagcatggttagaaagcaggggaggggatggggatgtagtggccccctaacctcaggttagataaagtacctgcctcttacagactcaggccaaatatttctaagatgggtaccaaggagcagaaccacttcccatacagtctatattcttgccactcctaggttgaggactgagtgatcctcttcaagttcattcttaaatcacccagctttccccttcttgaaaaaacgatttcttcctcttcttttttttttttttttttttttttttttgagacaaagtcttgctctgtcacccaggctggagtgcaatggtgtgatctcagctcaatgcaacctctgcctcccgggttcaagtgattttcctgcctcagcctcctgagtagctgggattacaggcacatgccaccatgcctggctaatttttgtatttttagtagagacagggtttcatcatgttggccaggctggtctcgaactcctgaccttaagtgatccacctgcctcgccctcgcaaagtggtggggttacaggcgtgagccaccccctggcgagaaaactatttctgaaattcattttctgaatcttcaaatgcagagtcaagttctttgctctcctcaggttacgggatatctttacctttggtctgtatgacgcctgtctcttgtttataccttcattcattcatgcattaattcccctatatctctctataccctactttcattcttctccctcccagagacaactgagagaatgtttaatttggccttataggagtgcattctcgcaaaaacacgtgcgatattttgagtgtgtctatttttaactgacataagcaggatgaagttagacacattctgttgtttcctgttttcacccagaaccatatttttattttttgttttttaaattttttgagacagagttttgctcttgtcacccaggctggagtgcagtggcacgatgtcggctcactgcaacctctgcctcctgggttcaagcgattctcttgcctcagcctcccgagtagttgggattacaggcacccgccaccacgtccagctaatttttgtatctttaatagagacagggtttcaccatgttggccaggctggtctcgaactcctgacctcaggtgatccacccgccttggcctgccagagtgctgggatgacacgcatgagccaccgtgcccggcaacaaccatatttctaaaagccccatcccgtagtatctgtcggatatgcggtctggagctctcactcattctggtgctccatgggtgccgctgtcacatgccgcctcctggtctccaggagggacaccaggtggccttcagctccccttatatagatggtgctggagtaagcattctcgtacctgcccctaacagacctggtaagaatgtccctgggatggatgcctggggacataagcgctgatggtgctggacctcactggactgagtactaccgatatgtctccagagtggcctccctgggccacacccctttgagtggtgcaagactttcctctgtgcccgcatcgctggaaacccttggcttattcacatattttttccccaatattaaaggtgtacagagatactgctttcatttccatctttctggttacaaatgactttgagtaccatgtcataggctgattagcttttcagacttcacttccctgatccgcctgttcacattttcggcctgttttcctattggggttgctgtgttattctggttgacttgcagacattccctcaggtagtctttgcatttttatttttactttattattatttatttatttatttattttgagacagagtctcgctctgtcgcccaggccggagtgcagtggcgcaatctcagctcactgcaacctctgcttcccaggttcaagcaattctcctgcctcagcctctcgagtagctgggactacaggcatgcgccaccatgcctggctaatttttttttatttttagtacggacgcggttttaccatgttagccagggtggtctcgatctcctgacctcacaatctgcccatctcggcttcccaaagtgctgggattacaggcgggagccactatgccccacctacatttttattttttatgtttagagacaggtctcactctgtcacccagactggagtgcagcggtgcgctcatagttcactgcagcctcaaattcctgggctcaagcaatcctgtctcagcctcctgagtagctgggactacaggcatgcaacactttgcctggctaattcttaaaatgttggtagagatgaggtctctctgtttcccaggctggtctcaaacccctggcctccagtgatcctcccaccttggccttccaaagcactgggattacaggtgtgagccactgcacccagaccctcatgtagccttgatcaacactgtctgacagaactttctggatgataaatctgttctcaatctgtgctgccaaatatggtagccactagtcacctgtgggttttgagcacttaaaatgtggctagtgtgaatgaagaactgagttttaaatttcatttaattctaaatcatctaaatttaaaatgaccacacagtgctagggacctctataacaaacagcagttagaagttaacccctgatcaattttttttttatgattctatccactatttaccatgtgctaattcctattctaaatgatttataaatattaactcattcaaaactcacaacaattccataggtagatactattttctccattttattgacgaggaaactgaggctcagagaggttgataactcacccaaggattcacaggaaatgggacaaccagcatctggatgtaaggtttggttcccgaaccacctgctattgcatcttttttttttggacggagtcttgctttgtcgctagactggagtgcagtggcgtgatttcagctcactgcaacctccacctccctggttcaagcaattcccctgcctaagcctcccaagtagctgggattacaggcacgtgacaccattcctggctaattttttgtattttagtagagatggggtttcaccatgttgaccaagatggtctcgatctcctgacctcgtgattcgcctgcctcggcctcccaaagtgctgggattacaggcgtgagccaccgcacctggccccaattgcatctttatttgaacaaatatcttagttttcatgtaatcatgtctttttttgccttagagtttgtgctttacaagttcagtggaggaagtccttctcccttcctgggttcacagctattctccagcattttttttcctttaatgtaaagttctccccactcacagaaggtcctcccaagctccttaaccttctacatggagagcaattcttcattttatttgtcttttaaagtaaaggattgaacaaaaggacatgtttctatttcgggtggtttctgaagccctcttaaagtacagtgttttcttaaataaagaggagtaggaacagaggcaaaaaccccataaggtggtgaggtaagtgattctagaagagacaggagctcgagagggatgagagctctggagaagtcaagaaggggaaattgccgggtgcggtggctcacatcggtagtcctagcactttgggaggctgagacaggaggattgcttgagtccaggagttcaagaccagcctaggcaacaaagtgagacctgtctttaccaaaaatgaagaaattagccatggccgggcgtgctggctcacacctgtaatcccagcattttgggaggctgaggcaggaggactgcttgagcccaagagttcaagaccagcctgggcaacatggtgaaacctggtctctacaagaagtacaaaaattagccaggcatggtggcttgtgcctgtagccccagctactcgggaggctgaggtgggagaatcgcatgagcccgggaggtcaaggctgcagtgagctgtgatcatgctactgcacttggttgacagggtgagaccatgtctcaaaaaaaaaaaaaaaaagaaaaaaaagaaaatcagctgggcacaacgttgcatgtctgtggtcccagctactaaggaggctgaggcaggacgataccttgagctcaggaggttgaggctacagtgagctgtgtttgtgccactgcactcgagcctggtcaacaagagtgaaactctgttcaaaaaaaaagaaaagaaaagaaaaaagaaagaaagagaagaatgggaaacttagtgaaggccagtgcattcacagtcatgagtgttttgaagggtactgttgcgagaccttgccaatcaccagggctagaggaggtggtgaaagagaaaactctccttgagaggctggaatgagaagataatgtgacttgggcaggtggaggcaggatgtcttccaaatagaggtgagaacatagtgtcagtggagatgggagagccaatggatgaatccaattgatggagtgaagctcttgaggaaatgaacaagtgcattacatttgaattcccagacattcagtgggaacctgctacaggagaggcactccaggagcaaaataaaaacaaactctcattcacaggtggtgggagttttaactggtccaaccacttgggaaaactgttaggcagtttcttttccttccttccttccttccttccatcccaaacacttgggaaaactgttgggcagtttcctttccttccttcccttccttccttcctttcttctttttgagatggagtttcatgtattctgccacccaggctggagtacagtagtgcaatctctgctcactgcaacctctgcctcccaggttcaagcaattctcctgcctcagtttcctgagtagctgagattacaggcacacgccaccatgctcggctaatctttgtatttttttgcggagacggggttttgccatgttggccaggggttttgccacattggccaggctggtctcgaactcctgagctcaagtgatttgcccccctcagcctcccaaagtgctgggattacaggcatgagccactgtgcccggccaattgttaggcagttcctaccaaagctaaaccaattcctccctctgactcagatgttccggtcctaggaatatctcccatagaaatatgaagagtggtcacccacagacatatctgagtgtgttcaaagtagctttctctggaatagccccaaagtagaaagcaccaaactgcccaccattagtagagtaaatgaacaggtggttcagcacacacagcgatgagaacaaatgaacagcaacagcacagatgaatctcacacatacaacgtcaagggaaagaagtcaatgcatgcatgctgtatgaccccatgtgcttaaagttcaaaaacaagcaaaactaatctagactgtttgaagtcaggatggagttactggtgacctcagaggcacaagggggtttctaaacgttggtgctgtttttttttccttccttcctttccttccttccttccctccctccttccttcctcgaagctgcagctgttccctccctcccccccttcttcttcttcttcctcctcctcttccctccctattttccttccttcctttttttctttctttagctttctctttctttctctgtcttcctcttttctttctttctctttctttccttttctttctttacctttctctctctctttctgtcttcctcttttctttccttttctctctctccccttccttcccttccctccctccctccctccttccttccttccttccctccctccttcctctctctctctctctctctctctctcttcccctccgcccccattgcccacgctggggagcgatagcatgatctctgctcactgcaacctctgcctcccagattcaagtgattctcctgcctcagcctcactcggctatgttctgtttcttgaactaggcgctggttacatgactgggctcagtttttgaaaatcactcaagctctacttgtatgatacatgtgcttttctgtatgtatgttatattcaataaaaggttaaaaatatatttaggaagtagctaacatttcttgagtgcttgctgtgggccaagtcttatgcattattttattcaatccccatgatgaccctacaagtgtggcggtggtgggtcctatcattccctctactttccaggtcagagaggtggggtcactgcttcgagttcacacagctagcacatggctgggctgggtcttaagcccatgtcctgctcaattctaacttctctgcaatgctctcaggtttggaaaagtaaaaggacaaggatttctcaaagtcagagggtaaaaaggaaaaaaacaaaacaaaacatgagatgatgatcccgccatacaattgcctgctaacttcatcaagaaacagttggaagatctcgaggaccaggtgaaggtttgaagcagggttggggtgaatttaataaagtgttgattaaacgttgtcaggggattctgaagactcagcttaagaggatacctgcaggaaagaaaggaactcttcctgcttcttctcttgaacaattttggctttaacgaccatttccccacaaggcaacaacaaatatttcatagttctactcttccaaagccctgttcacagcatcgtcactgtgggaggtgggcgcctatacccacttcactgataagcaaactgttggggctcagaaaacaataccccaaaatgaagttctccgaagcagccacagaagcaaaagtttttctctgaccttctcctgcccttctatctcttagtcccattctcccctggggctagccacaaaaactagaatccctcttccctaaggcgggtcgtagaaaccagacctcttttccccaaagtcagccctaacacctaaaaatgttactctaactttccctccacctttctttgtaaaaactagttataaaaaaattatctggccagctgtggtagctcatgctgggattacaaatcccgggactttgggaggccgacgtgggtggatcacttgaggtcaggagtttaagaccagcctggccaacatggcaaaacactgtctctactaaaaatacaaaaattagctgggcatggtggcgcgcacctctagtcccagctacttggaaggctgaggcaggagaattgcttgaacccaggaggcagaggctgcagtgagctgagtttgcaccacagcactccagcctgggcaacagagtgagactccatctcaaaaaaaaaaaaaaaaagaaaagaaaaagaaaaagaaaaagaaatgatctggctgggcacagtggctcatgctgggattacaaatcccaggactttgggaggcccaggtggtggatcacttgaggtcagcagtttgagaccagcctggccaacatggtgaaaccctgtctctactaaaaaatacaaaaattagctgggcatggtggtgcttacctgtagtcccagctacttgggaggctgaggcaggagaatcatttgaacccagaaggcagaggctgcagtgagccgagattgtgccactgtactctagcctgggcaacagaatcagactctgtctcaaaaaaaagaaaaaaaaaaaaaagaaattatctaacttacgttatttgaccgtaggttataaggatcccattccagagagggtcctgccccatacccagaaggaatgcatgctctgagagaccaagaagaatcaagacagcccccttattccagagagggtcctgccccatacccggaaggaatgcatgctgagagagaccaaggagaaccaagagagccccccctccattccagagagggtcttgtcccatacccggaagaaatgcatgctcagagagaccaaggagaatcaagacagccctttttgggtttccccactcagtctattagcatttacattgtacactttttgttcaatcatatttctacaccgctgtccatactttgttgaacctaagcttaaaaaacggacaatttcccctgcagctttgggtcttcattctgaaggctctcgtgcaaacacattaaataaatctgcctgccttttctccaattaatatgccttgtgagttgatttttttcagtgaaccttcagagggtcaagcccttggccactacaaaaccaaggttccggaaggccaggtgtcttgtcagaacactcattggttcatttcagagctgaacttgaactaaagctttctgactctactcttccccgtgagggaagcctccatcgcagcaaagcagctcactcaactttcttgcttctcaactgctcctttgcctagagagtctcctccctactgatccacagctctctgtctcccttcaaaactgcctcttgtgctgttttctctcttctccattccataacatgcatgggctcaggttacaccacagctgcgccggcccctagaactttctgggatgatggaaatgttctattctgatctgtccaatatggtagccaagagccacgtgtggctaatgagcatttgaaatggggctcagtggctaaaattttcatttggttaaattttaatgaatgtacatttatatttaaatagcctcgtgtggctagtggctatcctgctgtaccatgcagctctgcagttgaattatagagtggattacataatcgagggcgtgcagtccgtcacatgatggtgcaaactagtcattccctgtgtgccctctaggtcaatgctccagcgggctctgtgccctcgaggcggacccttgaagactacaactcccagaatgctttgctccgtttccggtttggtttggctgaggggaagcgctggcagaagatgaggggagggaaagagattggaatattgcttccctgctccctccctggttctgacagtagtcccttctgcacagctctgcctccactgggttccaggaaatgtagggctcgcgatggcttctctctgaggacctcaaacagccgttatctatttctctcacctgttcctatctctttaaggagtctcttcatggcatggtcttcttttgaaccatctagaagttaattctttttcctgttaggaccctgattggtatgaggtgggaggaatgaatggttcatgaaagctgcccacctgaagaccttgaagtccccccagtttctgaggtcaaagtctggagaagcaggatttgattctagatttccctacctcaagagggagggatgctctactgctttttttcaaataagacttcaaattgtggggagagacattcttccagattcttgcttcaccccattgtaaggcaaaggcaaatcctgagagctggaagcccaagaaacagaggaggtgggtggaagaactcaggagtgtcccttaaaactgtcctaagggtggaagaagataggaatgtcccttaaaattgtcctaaggtagggcttgcaaggaggtgacacagatcaaaatgtgaagcttgattctcagtgaggacccacgcagagactgatgtctgtctctccttcctggatgctcagttagactccgtttcccagctctgcaagtgggcgccgccatgtacgctctggtgacatcgatcaaaatgtggagcttgattctcagtgaggacccacgcaaagactcatgtctgtctctccttcctggatgctcagttagactccatttcccagctctgcaagtgggtgccgccatgtaagctctagccagtgggaggtagatggaagtcatatggactacttctgggtctgtcccagaaacatttctcctgtgcccttctcatgctcttttcccttctgtggcttgatatcaagaagcatggagactttggaagccatgggttgaagatgaggagctacaatatggaacaagcctgggcccctgacttactgcttagaggagaggtgcctgctgtttaagaatacattttttttttggccaggcacggtggctcacggctgtaatcccagcactttgggaggccgaggcaggtgggtcacctgaggtcaggagtttaagaccagcctgaccaacatggtgaaaccccacctatactaaaaatacaaaaaattagccaggtgtggtggcgggcacctgtaattccagctactggggaggctgagtcaggagaatgcttgaacccaggaggtggaggttgcagtgagccgagactgggccattgcactcatgcctggaggataagagcaaaactccgtcgcaaaagaaaaaaaaaaaaagaatacaccttttgaactttatctgtgcaagaacgaaatttttattgttttgagcccttatgcatgttgggattctttgttacagctgcaagcatatctaatacacttaataggaacttataaacagtaactaatacacttgggcaggtaaattgtcagtttcatgagaccatggatttgcctctttggttcactgatggatctctggtgtctagaacagggctgagcaggtggaagggttcaataagtgtttgttgaatgagctatcagcttccaatttttctttgcagctgactggaaagcagagaagtatagtagatgcaagctctggctcccaggtgggaaagggttgggtttatatcctgcctgattatttactaattgtctacattgggcaattgccaagcctcagtttcctcatagggaggttggagaattatataaaagctctttctttttgtggacagagtgaggattcaacgtgatcattcatgagaagtgctgagcacaccacctgatgcatagtaagtgctcaggaagtagcggtcatgattatctggacttttctcattctctgggcaaacaaaaagcacagaagctgcccctgcaataggctctgacaaatttcaggccccgaggggagggaggccaggcttgagcctgggattatagccaaagaccagctcaggaaacaatattacattcccatgatcctcctgcgatcccaggagggcttgagcctctgtttcttgtcctgacctcagactaactctgcagaaatgctgctcggggcttggactagctgctctggttcagggagccccattgagacctggaacttagagggcctggtggagtcctcaagactaatgtggggaatgagccatagtttaattcaggacaccccacttttttcaagtattattattatcaccagcctggagttatgcgtgattgggcagatgccttaggactgatcaggtttttctcctccattaattaaaatgtgaatcacagctgagtcactaaagaaaacggttaatgagcaattctgacttcctccctccttccttgctcagagagatgagtcagcagaagtccagatccaaaaatgagaagaagaagaagaagaagaagaagaaggagagaaaaggaaaaaaaaaaaagcccagaagagatgtagggcttgggaaagcaggagcaaaatgaacctgaaccatattattctttgtcttagcagaaaaaagttcccaaatcgctatcccaaggcctaacggtcaaatcctctaatgagcacgaccagttctcatttttacagacagacccacaggcacccagagatggatccaagccccagcaatctcctttcttgctttcctcaagcaacgacaggctcctcaccatgccaaaaacaaccaccaacctccacctttctttttctgcttcgttttccccacaaagcccaggctctcctttgaattcagacatcatggtcatgtttcataagataagggacgagtgaggagctggggtgcctccggtcaataggaaagggccatggggagtaacagtagaagatttcagaagtggggaggtccctcagaatcagggaagctacgtaactcaaaacatgattcctggagccaggctaagcctggatcctggcttcgtgtagagctaatcaatctttctgagcctcagttgtctcatctgtaaaatggggagagtaaaaatacctacgcagtgttgcaaagatgaaaaagtcagcacccatcagaagttaacaattataatattcattagaaaactatgatccaagaatttctgcctcacccatagggtcaccccaaagcaagatgatcagacaggttggggagatggtcctcactgagcactggcacacacacttgaacaggtgtgtgtgtgtgggtgtgcaagctctcatgtgtgtgcatgcaatttcccctcccaaatcaactgatcatgtataacactgcacattcgacttttgacttttgcaggatgaattttcatgatgcctatttatattttcaaattatgagcaggggctttcaccaattacccctgtcttgaccccttgttattcaaatgattctcttttgaagagcctgcagtgtcccagtccttgtcaatttttaactagatgaatactgtccagatcccatctgctaatgtctgggggtgtgatttcagcagcttgccaccatcatgctcactgactttaagaaatcttctattttttgcaaggttggtaatttctaagtcagtttgccttggacttgtgctagagtgtaagataatatttaacaatctagaacagtgactctcaaccaggggtgatttcacctcccaggggacatttggcaatgtgtggagacatttttggttctcacaactggggcgcgggcgctactggcatcaagtaagttgaggcagtgcacaggatagctcccattttggagctaataatgcagcccccaaagtcatcagtgctgtggcggagaaactctgacctagaacccagggggccatggcggtcctgaggcagagtcttgctctgtcattcaagttggagtaaagtggcgtgatctttgctcactgcaacctccacctcccaggttcaaacgattctcctgcctcagcctcctgagtagctggaattacaggcacccaccgccacacccagctaatttttctatttttttagagacagggttttgccatgttggccaggctggtcttgaaatcctgacctcaggtgatctgcccgcctcagcctcccaaagtcctggaattacagacctgagccactgttgcctgtccaggactcacttttacaagtagtcaattcagtcagttccttagggaccaaaaaatggattatgccaattttagggtccttctgcctctttctaaactacaatgaatttatactaagcgtggggctctgcagccagatttcctggattcaaattccaactctgccacttcctagctgtgtgaccttgggcaagatatttaacggctctgggtttccatgttctcactaatacatgtgaccaataaagcacccactgagtagttgtttgcattaggtaggctgatatgtaaagtacttacgacagtgcctgatacatagttgaggcatgagtgggaggtagactgaatccctggtgcaaacatggtgagcttcccactaaagattcacaagtgggactgggaaatggcagcctaatcagagactacatttcccagcctcccatgcagctagcctgggccacatgactaaattccacccaatagaatgcaggcagaagtgttgttcaccacttccaggaaccctcataagtacctcccactccactttcccttttccccagctgctgtctcaatgtaggctcttagaacaaccttggaagccacatgtttaagcagggagagcctccaacagcctggatccctgagtgactgcatggagtcgagccatatttgagtcacccaccactccacctcattgcacccctcaccagtttcactttattattttttatttttagtagagatggtgtctcactgtgttgcccaggttggcgttaaactactggggtcaagcgaccctcccaccacagcctcccaaagtgctagaattacaggcataagccaccacatccggccaccagttgtactttagaagttgatttctcactcatgcatactcttaagccagagatttttggttttattggttattgcagctggtgttaactaacacagcctcttcttccagcattgctttgtctctcttgatcagcaaatattatcatctcttcaacatctgaccagcttcaagacaactacagtcctctccttcatacctttcctatgagttggcaaataagctggggaagaagccccttctcccattggggatgaggaaagggaataggttccctaggccaggatcttagtaaagatctttgatacagaaacaagaagggatctgggagtcatgaccactcagcatctcaggccaaagaatgtgggtgagtaaaataatggtacaatggactttagagacttggggggaagagtaggaggtgagcactggataacagacaacaaatatggtgcagtgtatactgcccgggtgatgggtgcaccaggttctcacaaatctccactgaagaacttactcatgcaaccaaataccacctgtaccccaataacttatggaaaaataaaattaaaaaaaagaaaaaagaaaattaagcaaataaaaataatcaaaatctaaagaaaaccccaaaacctaacaatttctgaaaaaatagtatgtgggtatctgtttattaataaaacattcaattataatttcaacatcaattaattgatcagcataaataaatggaccaaatttcatatatatatatacatatatatacacatatatatacacacatatatatacatatatatacatatatatacatatatacacacatatatatatacatatatacacacatatatatacatatatatacacatatatatatacacacacacacacacatatatatatatatatatatatatatatatatatatatatatacttgcaagtgaaactcaaactcatattagtaccatcaaacagtagcaatatgtgccgacatctagatcgtctgctcaaatatcactttcccaataaggcctaccctgaccaccctattcaatgctgtatcttgcaccccagaaagtggcagggccaggacttgagcacagcactcccaaattccctttacccgactttactgattttcccacctgcgaacacaccatcgttaatgtttagggttctcaccctcccccacctcactacctcataagaaccagagggtctcctcatcacctagaatagtcatgggtacacagtagatgctaaataaatgttgatctgagtgaagtgttgttctttgcctgggacattctaagaggtttatacatatgaactcatttgcatgctcaaagcagtttgaccaagtgatgagtttaaaaaaattatctccattttatagataaagaaagacaggttcagagagagcactcaggcagaagtggaagagccaggatttgaacccagactgtctggtccctgggtctaggagctccagacactgctttgtctaggcccacaacacagagtcaacaaacccgggacaagtgtgaggggaacccaaaccagaggtgttcattcagtttttgtttgaaaaatacacaccatgttgcgtatgggtgtggatagggccaggctcacaagattgtgcttggcgacctttataaggagggaggacctgggtgcagtggctcatgcctgtaatcccagcatgttggaaggccgaggtggggggattgcttgaacctaggagttctagaccagcctgggtaatataaggagaccccatctctgcaaacaaacaaacaaacaaacaaaaaaaaactttaaattagctgggcatggtggtatgcacctgtggtcctagctacttgagaggctgaggtgggaggatagcttgaacctggaggttgaggttgtaatgagccgtggtcatgccactgctctccagcctgggtgacagagcaagaatgcatcccaaaaagaaaaaaaaagttggtacatatggtacaatggtacatatgttcaaatcttggcctcaccactctccagctgtgtgatcttggggcagtaacgtaacctctctgtgcctcaagtcttatttataaaatgggttgttgggaggataaaatacattgacatttgtaaagtgctcagaacaggttcataggcacacatatgcacatatgtgcatatatatatatacacatatacacacacacacacacagtaataaggttcatagttaatgctgctatatatgtttctgttaaggaaataatggtcacagcttccacccggagctcaggagcgtggagcaggccacctgagagcagagccaatccctgcactgtattcagcctcatgccacctggggaacagtgtgttccagtcaaaagagctaacagcgaccttccaacagctcctgctaattttaaggacaagcctctcagtgctggcgctggagtcaattgttgctttttcaacaacagcaccaggtgtgtgttaagaggcgtgccatcaggaaggcatcctctcccgagaaagctggaagtggcaagtggcccaggctgccctgaacaggacagaaaatggttcagagcaaagctgaggtaggcagggagaaaagataccagggccgtatcctctgtgtcctccccctgccaggcagaataatctggcattgcttaaatatggtacaagtcccgtgatgtttccagcctgcaaagcacctacagctccaaagtgctttccagaaatgagctaactaatccccaggggtgggtcatgatgctaaacgtgaaccatccctgaggggaaaggtgtggaagagtgttattccaagaaaacaggcaaaactgcagggcaaggagtgagagactgttagtaagaatgatgataaaaatgatattattattattactcatattattatttgagatggagtctcactgtgtcacctaggctggagtgcagtggtgtgatctcggctcactgcaacttccacctcccgggttcaagcgattctcctgcctcagcctcctgagtggctgggattacaggcaccccgccaccacacccggctaatttttgtgtttttagtagatggggtttcaccatgttggccaggctggtctcaaactcctgacctcaagtgatctgcccgccttggcctcccaaagtgctgggattacaggtatgagccagcgcgcccggccattattattatttttgagatagggtctcactctgttgccctggctggagtgcagtggtgtgatcacagctcactgtagcctcaacttcctgggctcaagcaatcctcccacctcagcctcccaagtagctggaactacaggtatgcaccaccatacctggctaattatttgtatttttatttttattttttgtaaagacagagtctccctatgttacccaggctggcctcgaactcccgtgctcaagcaatcagcctgcttctgcctcctaaagtgctgggattacaggtgtgagccattgctcctggccatattattggtagtagtattgcattattatcaacagtctgtaatatttcttgagcgcttacaaggagccggatactgttctaagagctgtatgtcaattatttcaataaatcctccataactgtatgaagtaagagtgttattatccccattgaacagatgaaacaaatgaggcccacagaggtttgggcatcagctccaagtcacacagcttgcaagaaggggagctggttcaagcccaggtattctgataacatagcatctctatcatcctcaccattataatgatgttctgtatatttcacagtatttgctggggttggctactgttgacgccattttacagatgagaaaactgagttatagagggacttgctgactggcccagggtcacatagctgagaggtggcagagtcagaatgcatccattcatgtggtctcagcagccacatcagcaccaatgggacttcgatattgcctggatggtcttccctctttccatatgccagctttatggagaacagagtctggacagatgcagtggctcacacctgtaatcctagcattttgggaggctgaggagggaggatcgcttgaggccaggagtttaagacctgcctggtcaacatagtgaaaccacatctctataaaaaaaggtaatataaaaaggacgggcatggtggctcatgcctgtaatactagcactttgggaggctgaggcagactgatcacttgagcccaggagctcaagaccagcctggccaacataggtgaatccctgtctctactaaaaatatagaattagccaggtgtggtggcgggtgcctgtaatcgcagctacttgggagtctgaggaacaagagttgcttgaacctgggaggtggaggttgcagtgagccaagatcgcgacaatgggcttcagcctgggtgacagagggagactctgtctcaaaaaaaaaattatatatatatatatatatatatatatatatatatatatatatatatgaagggaatctgatccctaacattagtggaacagcttcaattcagggattgagcaggaggagaggctggtgcattcagtgtccactccccagcatcagagtggattctacccagcttggtgagaattctctgtacccaatttgccctttgatactgcactgggcagagagggtgggtgggcatcctcctactagggcaggaggagtccttcacatatacctgtattctgggccatcacccttcagccagagtcatccttctaaataaaaagctaagcacaaccaccccttgtctaaatccttccatggctcccttgtgccttcaggataaagtccaaactcctcaaaacatgggttggttcctgctgaccttctgtaggttcttctcttgccatttccctctcccaacacacaagcacattcacacacacacaaacacacacacacatgcacacatgtatgcatgtgtacacacatacccacacacaagcacagctctgtttacctgtttcctgtataaaccctatgatgtggaatcccagctctgctacctgggcaagtcacttaacttctccatgcctcatttttctcgtcagtaaaatattttgctctcctgtgcttctctagactagaagaatgcctgacacacaaaatgcaccaaatggtcattttctgtttggttttgtgaaagacaaaacgcgtagacagtacaaaattcagaaagacacaagaaagtaagtttcctttccacacctacttccaaatctttcagggtgccgctacagaggcaaacacaattattaatttctcatggaatcttccagatttgctcttacgagaaaatggcggcaccattcaaaaactgcttttgtcacctgataacatatcttggatatagagattcctatttccttctctgtaaaatggggatatgaaagaatccacctcacaggcttgttacaagaattaaatgagttaatactcactttctaacagcacttgtatacagtagacaccctataagtactagctcttattgacactcagagatctgcttcttctttttgtaatgacttcataacacgctaagggatgggtgtaccatagtttatccgacagttcttgttgatggagacgtccatcaatggagtcttccaattgttatgctgcaacaatgcttctctttgctgtaacaatgcttaataaatatggttcacgtctgtaatcctagcactttgggaggccaaggcaggcagattgcttgagctcaggagttagagaccagcctgggtgatatggtttggctctgtgtccccacccagatctcatgttgaattgtaatccccaatgttgggggagggacctggtaggaggtgattggatcctgggagcagatttcccccttgcttttctcatgacagtgagtgagttctcgtgagacctggttttgtagcactccccccctcactctctctctcctgccaccatgtgaagatgtgcttgtttccccttcattttccgccatgattgcaagtttcctgtggcctcctcagccatgccttccgcacagcctgtggagccgtgagtcaattaaacctcttttctttataaactactcagtctcaggtagttctttatagcaatgtgagaacaaacgaatacactgggcaacatggcaaaaccccgtctctacaaaaattacaagaattagcctggcgtggtggcttgtacctgtggtgtcccagctactcaggaagctgaggtgggaggactgcttgagatggggaggttgaggctgcagtgagccacgatcttgccactgcactctagcctgggcaacagagtgagaccccgtttcaaaaatatatatgtggtgaaacaaaagaactaatgaatgaagaaataaatggaggaatactttgagcagggtataaggaacctgggtaagtttcagagattccaagatcttcaaaggtacctttctaggcactaagtccttttacaaattcctttcatgtggcactaacattatatgttcaatacaccagcatgatcagattataccactgtgtgtggggtgctagggccattctttgatggagaactggtctacccattgcaatcattctcacagatgcaagctgagctggttcacaggtgagcaactgttcttgccccaaagaatgtagttaatgttcttcccataagctcatggcttttgagaatactgttggtcccaaaggggagacagtagttggtcaaaggaataccacctcagcccaggaaggggactgtgtactgaaggaacagtaaggtgtccttgaggggtttgaagggttcctggtgaggctcgattgtgttgtaggatgaaggctgaagagtggggtgggaggcagggacgaggaaggagatgggtcatgagctctattaaaatgtatttttgtaattccgagttgaaaatagacataccgacttcatgctgactgtttcggcttcgtgacatagcctggctcgtgggggccttcccattcagcacgtctccgtggcaacaggccactttctcattcacgccatctccagggttaccttgcttggctcattcaggactgttgccatagagacaggtccattgatacaatcttgacgctttggaactttgctttcccgaatgatggagtattggccgtggggtacggatgacattgtgatagggtgtgaggcgaagagagttctgggagttgaggtataaagacttaaaatctggcaagaggaagatgaggtcatggtaggagatatggtaaggcagtagtagaccaatatcattcctgatcttgacatgtgaaatggttgatcctttgacaatcctgtgtgtgtgtgtgtgtgtgttgtgtgtctgtgtgatgtcttttattagactcaaagtacaaatacgccaggcacttagccttgtcattgttgatgtctgtatctccagcatctagcacagcgcctggtacaaagtaaatgtctcctcaaataataataagaagaagaagaataagaatttctttttgaggcagggtcttattctatcacccaggctggagtgcagtggctcgctcttggctcactgcaacctccaccttcagggctcaaatgatcctcccgttttagcctcccgaatagctgggactacgtgcatgccactatacctggctagtttttgtattttgtgtagagacagtgttttgccatgttgcttaggctgatctcgaactcctgattcaagctcagaagtgaatcaggagttcaagcaatcctcccaccttggcttcccaaagtgctaggattacaggcatgcaccactgcactcggtctacccacaaataattattgaataaattagaacttgttgtttgcagtaaactgtaaaaatataaattgtccttgataaaccataaaaatataaaaacattagaagagaatttccacaagcaaccaccactattatttactctctacctcccagcatgtatgcccatatagtgcattttctcctgtttctatagataactgtgtgtgctgtcatctaaagtgaaaccttccacctgtacaccaaatgccatcccctctcgtccaccaagagatgtcctcctgacactcttcttcctccagcatcctcatgtttttctcccctaataggttattcctatcagcataaaatctgctgttaggtctcccatcttttttttttgagacagggtcttgctctgttgtccagcctggagtgcagtggtgtgatcatagctcactgcagcctcgacctcccaggctcaagagatcctctcacctcagcctcccaagtagctaggaccacaggcatgcaccaccatgcccagctaattaaaaaaaaattttttttgtagagatggggtctcactatgttgtccaggctagtctcaaattcccgaggtctcagcctcccaaaatgctgggattacaggtgtgagtcattgtgcctggccttttttttttctttattcttttttctttttttttttttttttaagggaaacaaacctctgaaatccacttcccccaccagctaacacatgccccatctctcttcctctacccttcacagcagaactctttaaaagagctagtagtaatccttccagtagcctcttgccttcacctcttcacctaagcagctctggctcaggtcacgaaagatctccatgccactacatccaatggttgattctcatttttcatttgagtcaacacatcagcatcagtggacatcattgatcattccctcatacttgaaatggcttagcactttccttgcatgacagccagcacccacattcttctgatttgctccaattcagtcttctctgctggctcctcctcatcttccccaacctctttaatgatggagagtaagccctgggctcagtcctgggtgctctcctgcatctatgcccttattcagttccttaaatagcctccacaggaggctgactcctgcctttggatctccagctctgacttaccttttttgaattttagactccaattcctattaggctggtgcaaaggttatttcctttgccattacttttaatggcaaaaccgcaattacttttgcaccaacctaatagatggccaacacaatatctctatccatcagtaggcacttcatagaaagctgagttcctaatctgcccacctagtcagtctccttccccattttatttgatggcaaacccatcctttcacttgcccatgtgatagggtttggctgtgttcccacccaaatctcaacttgaattgtaataatccccacgtgtcaagggcggcgccaggtggagataactgaatcatgggggcagtttcccccatactgttcttgtggtagtgaataagtctcatgagatctgatggttttataaatggcacaagctctcttgcctgctgccatgtaagacatgcctttacttctcctttgccttctgccatggttgtgaggcctccccagccatgtggaactgtgagtgcattaaacctctttcctttataaattacccagtctcaggtatgtctttattagcagtgtgagaagagactaatacaccatgtcaaaaaatgtggggttctccttgacttccctctctctctttctctctctttctccttctctctctctctctctctccccattctcctttttgagacagggtctcactttgtctcccaggctgaagcacaatggtgcaactacagctcactacagcctcaactttctgggctcaaatgatcctcctgcttcactgtcctgagtagctgggattacagggacacatcaccctgcctggctaatttaaaaatttttttttgtagagacaggggtctcactatgttgcccaggctggtgtcaaactcctgggctcaagcggccttccccacttggcctcctaaagtgctgggattacaggtgtgacccaccgtgcctggcctctctctttctcttaaagttcatactcagttgagtctgcaaatctaaaattaagtcaacacagatagtgaaaccaaccacccctccccacctccatgaccacagccctgacttgaggcctccgttactgcttgctcagaacattgcagacaactcccaaatgagatccttgtttccacgccgcctccagtgtattcttttttagatgttttatttgttttcttttgcagaaaagaggtctcactgtgttgcccaggctagacttgaactcctgggctcaagcgatatcctcctgccttggcctcctgagtatctgggactgcagccatgtgccactctgcacccagcaattccttagcattgacaagcatatggtgataatataagatacaaacaacaggagaaactgggtgaagggtatgtgggaactctttataatatatttataacctttcttttttttcttttcttttttttttttgagatggagtctcactctgtcacccaggctggagtgcagtggcgcgatctcagctcactgcaacctccgcctcctgggttcaagcaattctcctgcctcagcctcccgagtagctgagactacaggcgcgtgccaccatacctgactaatttcgtattttcagtagagacggggtttcaccatgttgcccaggctggtctcaaacgcccaacctcaggtgatctacctgtctcggcctcccaaagtgctgggattacaggcgttagccactgcgcccagctacaacctttctaaaagtctaaattactctaaaataaatatttaaaaaataacatttgtttggtagaaagggtccactgatttaaaaagatttgaagactactttggtaggcatttctgaagtgggacatgttatggtgtgacttaaatattaggacaaaatggtgtggttggaagttcagaaagtgggttaggaccaggtgtgggggctcacgcctgtaatcccaaggctttgggaggcacaggcaagaggactgcttgagcctagaagcttgagaccagcctgggcaacctagcaagaatccatctctacaaaaagttttttgttttttttttttgttttttttttagatggtgtctcgcgctctgtcgcccaggctggagtgcagtggcgtgatctcagctcactgcaagctccgcctcccaggttcacaccattctcctgcctcagcctcccgagtagctgggactacaggcgcccgccaccatacctggctaattttttgtattttcagtagagatggggtttcactgtgttagccaggatggtctcaatctcctgacctcgtgatccgcccgccttggcctcccaaagtgctgggattacaggtgtgagccaccgtgcccggcctacaaaaagttttaaaaattagccagtgtggtggcacatgcctgtagtcccagctactagggaggccaaggcaagaggatcccttgagcccaggaggtcacggctgcagaaagtgattatagtgccactgcactctggcctgagtgacagagcaaggtcctgtcttaaaaaaaaaaaaaaaaaaaaaaaaggccaggcacagtggctcacacctgttaatcccaacactttgggaggctgaggtgggaggatcacctgaggtcaggagttcaagaccagcccggccaacatagcgaaaccccgtctctactaaaaaaaaaaaaaaaattgccgggtgtggtgccaggtacctgtaatctcagctactcgggaggctgagacaggagaattgcttgaacccaggaggtggaggttgcagtgagctaagatcttgccattgcacttcagtctgggtgacagagccagactctgtcaagaaagaaagaaagaaaaagaaagaaagaaagaaagaaagaaagaaagaaagaaagaaagaaagaaaaggaaggcaagggaagggaaaggaaataaaagaaaagaaaggaaggatggaagagtggaaggtgagataaaagcagatagaagcctgggcaacatagtgggaccccatctctacaaaaaatacaaaaattagccaggtgtgttggtgcccgtctgtagtcccagctactcaggaggctgaagtgggaggatccttgagccaaggaaaaaattgaaactgcaatgaactttgagtccgggagtttgagaccagcctgggcaacatagggagactccttctctataaaaataaataaaaataaattagccaagcatgatggtgcatgcctgtggtcccagctactcagaaggctgaggcaggaggattgcttgagcccaagaagtcgaggctgcagagtaagctgtgattgcgccactgcactccagcctaggcaatagagcgaggctctgtctcaaaaaaaaagcaggcagatagcagcgaaggacaatgtgccacattaaggagcttggatagtatcttgaaagcaataagggtttaaaaaccagggaatgttggagacacgtggcacaagaaaggtgtcatctagatggacagaagaccctcatgatcccatgacagcgactgggaaggggtaattaaaaacaaagaaacacaagccaaaagcatcatcaggctgagaagagaaaatgtcttagcatggctgagaacacactcaagaaatagaagctctgccgggtgtggtggctcatgtctgtagtcccagcactttgagagaccaaagtgggcggatcgcttgagcccaggagttagagaccagcctgggcaacacggcgaaactccatttctaccaaaagtcctaaaaaaaatttgcccgggtgtggtggcgtgtgcctgtagtcccagctattccagaggctgaggggggaggatcgcctgagcctgggaggtcaaggctacagtgagctgagatcacacctctgcactcgagcctgggtgaaaaagagagatcctgtctcaaaacaaaagcaaaacaaacaacaacaacaacagaagagaagttctgagatgcccatgtaggacagctggttactcattgggggactttcccaaagcgattttggggaaggtaggaactactgggatgaggagggcataggagatgggctgtattcccagggagcttaaaggagtcagggcagaggcttcagagtaggaatcagggcaggatttgggggatggaagatcctgtcttcctccgagacagagagaaggcgggtgtgtgtgcggcgcggaatagaggcaggtggtgccgacaaggaaacgtgcggaaggaagggagatagacgcaatccctgcatatttttctcagcccattctgtgctcttcacaacacgcctgcctttatgacctgggggacagggtgagaggcttctgcatgtcagagctagactgagaggatgttcctcccttgtcttcagagctgagtgggtcataacatttagaactagatgaggccaggcgtggtggctcacacctgtaatcccagcactttgggaggccgaggcgggaggatcactcaaggttgggagtttgagaccagcctggccaacatggcaaaacccggtctctactgaaaacacaaaaattacccaggcatggtggtgcacgcctgtagtcccagctactggggaggatgaggcagagaattgcttgaacctgggaggcggaggttacagtgagccaagatcatgccactgcactccagcctggtcaacagagcgagactctgtctcaattaaaaaaaaaaaaaaaaaaaaaaaaaaaaaagtagatggggcctcagaattcactgaggccaatttcctgatttaacaatgaagagaaaactccagagggactgagggagctgtccaaggtcacctagcaagtgagggacagatctgggatcagaagaccagtctctcaccagctggcctgtgtcttctactgcactgtgctggtccccacaggcctctgagcggtcctctctgatgaagcttcctacgctgataaaaatattctctatccatgctgtccaatatgatagccaccacccacaagggatgattaagcacttgaagtgcagcctgtgtgagtgagaaacagaattttaaatttcgcttaattttttttgagacaaggtcttgctctttcacccatgctggagtgcagtggcacaatcacagctcactgcagccttgacctcttgggctcaagcgatcctcctgcctcatcctcccgagtagctgggaccacaggcctgcaccaccacgcctggctaatttatttttattttttatagagatggggtcttcctatgttgcccaggctggtctcaaactcctgggctcaagcaatcctctggcctcagcttaccaaagtgttgggattacaggcgtgaggcacagcatttaggctgtgtgcggtggctcatgcctgtaatcctagcacttcgggaggccgaggcggtggatcacctgagatcaggaattcgggaccagcctagccaacatggtgaaaccctgtctctactaaaactacaaaaatcggccgggcgcggtggctcacacctgtaatcccagcactttgggaggctgaggcgggtggatcacaaggtcaggagttcgagacaagcctggccgacatggtaaaacctcatctctactaaaaatacaaaaaattagctgggcgtgttggcgggcgcctgtaatcccagctactcaggaggctgaggcaagagaatcacttgaatccaggaggcggaggtggcagtgagctgagatcgcgccactgcactccagcccaggcaacagtgctacactccatctcaaaaaacaaaaacaaacaaacaaatttaaaaaatccaaaaattagctgggtatggtggtgcatgcctgtagctacttgggaggctgaggcaggaggattgttgtgtatattttgccacaatcaaaacaaaacaaaacccaaaaccaatttaatatccacatacggatattaatatccaaatacgtgcaattggtgaccgaattgcacggtacagctcaaagaatgtttccaagaatggcttttgatgaccacctcaaagctcacagtctttccagagagaccgtcaccctctccccaagggggcagcctgatgttccaggaggtggcagccactcgtccaggtcagaaagcgactgccaagaactcactggaccttggaagtcagccagctgccaatctgtcagcttgcatccggagggctggagaagaagcgctgtgttaactgtgcaactctgtgctgctgtgcacgctcggtatgtgggtcccgaggggtttccactccactgggcaggaacagggagggaaggctgtcatgtttcggtttctgaatgtccagctgctgtgacagcaggaaagagtcgccaagggctgagactggtgggtgggctggctccccagatagaacaatccacccagagcccattctgtaggtagtgaggcagcctccatcaaaccagtcgtggattctctgtttctgtagagctctgcctgtttatgcctcactttctggggatgaactggcctgggcttctgcaataatttcagcacaaggagttaaaagagaaccatagttgcccagtgtggtggctcatgcctgtaatcccagcactttgggagaccgaggcgggtggatcacaacaaggtcaggagatcgagaccagcctggcccacatggtgaaaccccatctctactaaaaatacaaaaattagctgggcgtggtggtgtgtgcctataatcccagatatttgggaggctgaggcaggagaatcgcttgaacccgggaggtggaggttgctgtgagctaagattgcactactgcactccagcctgggtgacagagcaagactccatctcaaaaaaaaaaaaaaaaaaagagaaccatagcatcttccaccaagacacagacctccatggccagccctgtcccctgtcaagagctctcccggccccatgttcttttccttcctggcggttagcacagtagatgctcaaaaaggtatctgtgacaatatttgtgttgcaaatgatgtcaaaactgtgcaaaaccatgttggtttgaatcctggctctgccacttactgttcctcctcaggtgagttacttaaccccactctgtcttgatttctctgtggttttccccatagagagaagacatttgttaatgtatgaaaagtccttagaacaatggaatgaagcttccatgaagtcagctttctcaggtccacagcaaatatttgggggagtggaggtgggggcagaacccttcaggcattcagtacaaggtagtggtgtgtgtacgtgggaggcagtcccagatgtcagaacctgaattcaaagcgcattctggctgtagtgggttgaacagtgaaccctccagaagttatgttgatgtcctaatccctggaatgctaccttatttagaaaaaataaggtatgcaggtacgatttagttaagaatatgagggcaagagtttattcctggattttctgagtggggcctaaatgcagtcatatgtatccttatgacacagcagaagagggaactttgagagggaagaggagaacgccctgtcaccactgaggcagagactggagtgaagcaactccaaatccaatggaaggatcctcccccggatcctttggagggaccctggtgacacctcgatttcagacctatggcctccaaaacagtgagagaatacatttcccttgtttgaagccgtgtggtttatggtacagtcatgtgctacataacgatgttttgatatgttttgatcaacagcggactgcctatacaatggtggtcccatatggttataactgtatttttactgtaccttttctgtttagatatgttttttattttttatttttttgagatggagttttgctctgtcacccaggctggagtgcagtggcatgatctcagctcactgcaacctccacctcccaggttcaagcgattctcctgcctcagcctcccgaatagctgggattacaggtgcctgccaccacacctggctaatttttgcatttttcagtaaagaaggagtttcgccatgttggccaggctgggctcgaactcctgacctcaggtgatctggaattacaggcgtgagccaccgtgcccggcctagatatgtttagatacacaaatacttaccattgtgttacaactgcctacagtattcaagacagtaacctgctgtgcaggtttgcagcctaggtgcaatagggtatgccccataactgaggtgtgcagtagtttataccatctaggtttgtgttaagttctctacatgatgtccacacaatgacaaaatcgcctattgactcagttcttagactatatttccaaggctggaaacagtggctcatatctgtaatcccagcactttgggaggttaaggtgggaggctcttttgagcccaggagtttgagaccagcctttggtaacatagggagaccccacctctacaagaaatttaaaaattagccaggtgtggtggcatgcatctgtggttccagctactctggaggctgaggtgggaggatcgcttgaacccaggtggtcgaggctgcagtgagctgttatcaggccactgcactccagcctgggtaacagagtgagaccttgtctcaaaagataaaaagtatcccccaggacaatgtcagttaaacaagatctgtagattttgttatctaattagacccaggatagaatggatgtgggacaagtaagaatgctgttaaaatgaagaaaatcctggccgggcatggtggctcatgcctgtaatcccagcactttgggaggccgaggtgggtggaccacttgaggtcaggagttcgagaccagcctggccaacatggtgaaaccctgtttctattaaaaatacaaaaattagctgggtatggtggcggacacctgtactcctagccactcaggagactgaggcaggagaatcacttgtatctggaaggtagaggttgcagtgagccgagactactacactccagcctgggcgacagagcgggactctatctcaacataaaaataaaaataaattaaaaaatagagaaatgattaaaaaagagactgctgttgactttggaatttttgggcaggggtcagcaaaccccatgggctggccatctatttttataaagttatgtggaattcagctgcatccattcattgacctattgcacagaaaggctcgctctctctctcaagcagaaggaggctcacttcatggtctcttttcttaagtaaagcagtgaattgagttgaatactatttcccccaaattcgtgtttaccgaaacctcagaatgcaatcttgttttgaaataagctctttgcagatgtaactaattaaggatcttgaggtgagatcatcctggatttagagtaagccctaaattcaatgactggtatccttctaagaagaggaaaggacatagacacacagagaaaaaaggcaaatgaagatggaggcagagattgaagtggatgccagacaaagaataccaagggttgccaggagccaccagaagaggcaaggaagaattctttcctagagcagttgtcaaggtggctctgctgacaccttgattttaggcttctagcctccagaactaagagaaaataaatttctgttgttttaagccgccaagttcatgttactctgttataacagccctagaaagccaatatagggagagaaagatgaggtgacatgcctttgcccctgatttaatacttcagttaattctggaaaagaaccccttatcagataggtcctgtttgacaatttgattcaataaatatggtagcaaccactggatgtccaccactcccccatcccccaccatcttctacagtaatggaattttagccaagtcatggagttcccaacaaaactacatttcccagcatccctagcagtttggtatgatcacatgattaagtttccatcagtgatatgtcagtggaagtgacagctgccacttttgggtctgagacttcagaaattcaaggtctgcctattcaagaccagttaagttttgattgtgcaaatggtgctgaagatcatttggtggtagaaaagaagagggcaacaggagcctgaatccctgagtgactttgtggaagtgagcttccctgccaacctgcatggctaaccttgcagctattataggagagaaattatttttttttctttaaggttttaatccggtggccttttgggtctcttagtatggcagcatacctttgctacataatataataaatattaattatgtacccaggaagttgtagtcatgggggataggacaatgactggatgggtagggccctgctctcatggagcttacaatctaagggaaggaaagcagataatttaaacctcaattataatacagggggataaaaaacctggtggaagagcactgctatggtctgaatgtctgtgtctttctcaaattcatatgttgaaacctagtcaccaatgtgaagatattaggaagtggggcctttgggaggtgattagatcatgaagacagagggattcatgctctcatgaaagaggtttcagagagctgcctcaactcttttcaccatggaaagatgcagtaggaagaccccttctacgaaacaagaaatggcccctcatcagacaccaaatctgtcagtgccttgatcttcccagcctccagaactgtggaaaataaatttctgaggtgtataagccacccagtttaaggtattttattatagccacctgagaggattaaaacaggtgctctctgggcaaaggaagtgtcctcatccagatttggagggtcaggagagggtttttggaggaaataatgcctattctgagacttgacagcaaagggtggaaagaagaagagtatttcaaaaagaaggaaaaataattccaaggctatccagtgacagaaagtataggatgctaggggatccttaaaaagttcaatgggctggatgtggtggctaacccctgtaatgccaatactttgggaggccaagatgggaggactgcttgagcccaggagtttgagaccaacctgggaaacatagtgagaacccatctttactaaaaataaaaatattagctgggtgtaatggcatgcacctgtgggctcagctactcaggaggctgaggtgggaggatcacttgagcccaggagtttgaggctgcagtgagctgtgactgtaccactgcacttcagcctgggtgatggagtgagaccacatctcaaaaaagaaaagttcaatgtagctagagtggagagataacacaggtgatatgggtcaaggccagatgacgcagggtctcaaagacactgctaaaagcaatgggtcaccttgagaggacttgacaagaagaaagacttggtgagatttatattctgtgtagtaaagagttaactccttggggttggggagttcaaactctgcatattccaaaggaaggactggcccttggctggctcctggaaagaatatctgtatatctagggctttgggccatgcctggtagcttatgctcacaatgggatctatggtgactgcctgtttgtgttcagctggggccctgggacacacggtatcagtttgatcttggagtgtgctggagacccagcagttaaagtcagtcacatgggtgctccatgtcaatgtaactgagccccaataaaaaccctggacaccaaggctcaggtgagcttctctggttggcggtacactgtacattgtcacacaccattgctgggagaattgagcactgtttgcataactccactgggagtgaacagctggaagctcatgcctgatctcccctggacattgccttgtgcatcttttgctttgcagattttaatctgtattatctgtattcttccactgtaataaaccataactgaatttcacagcttttctgggtcccgtgagcccttttagcaaaccttcaaacctgagagtggtcttggagaaccctgacacatactcttacaaccttgaagctactccaggtcaataagattcttgttctagttgcatctcaagagaaaagcaattccctctctgacgaactttcagatgtcctacctgcttgctggccacaggactttaggggatttggagatggacaaaactggcctctgtctccaagcagctcagagtctagagggcaaggcagaaaggagaccaaagacagcaatcagcacgtggtgtgcttttatggcagagtgcgtgatggagggctagtgggttcatccctaccttaaattctggccaggaatggggacaagtcacagcacccagatcagagattaagttgatgaagcttgggggaatggtgctgtgtatctcaggggagaaggaggtgaagtgaagccaatgctgtgtgggccaggattgaatcccagagagaattttcttttcttttcttttctttttttcttttttgagacaaggtcttgctctgtcactcaaatgggagtgcagtggtgcaatcttggctcactaccacctccacctccccaggctcaagcaatcctcccacctcagcctcccaagtagctgggatacaggcatgcaccaccacgcctggttaatttttgtatttttttttgtagagatgaggttttgccacgttgcccagtctggtctcaaactcttgagctcaagtgatccacctgcctcagcctcccaaagtgttgggattacaggtgtgagtcactgcacctggccaagagttttcttctagaaagtccgcctgaagttgtgcagcatttccagtagccagagctactctgagagataaatgaggctctttgccaatgttggctaaaatctaaaacatcacccaaggcaacctgtatcatactctctgacttctcccctccacagcccccttgccctgccctccagggagtgtcccttgcaaatgtcactgttcttccttccctttcataccaccttcatttaacaatcaaaacagctggccaggcgtggtggcttacgtctgtaatctcagcactttgggaggccgaggctggcagatcgcctgaggtcaggagtttgagaccagcctgaccaacttggagaaaccccatctctactaaaaatacaaaacaaacaaacaaacaaaacaaaacagctaggagtggtggcacgtgcctgtaatcccagctactcaggaggctgaagtaggagaatcacctgaacctgggaggtggaagttatgatgagccaagatcatgccattgcactccagcctgggcaacaagagtgagactccgtcacaaacaaacaaacaaacaaacaacaacagtcaatgcatgccaagaactgtgctggatgttctattacttatttattttattttttaacttaatttgtatttatttttatgttttagaggcagggtcttgatctgtcacccaggctggagtgcagtggcatgatcatagatcactgtagcctcaaactcctaggctcaagtgatcctcctgcctcagcctcctgagtagctaggactagaggtatgcctgcaccatcatgcacactaacttattttattttacttttgcagagatgggggtcttgctatgtttcccaggctggtctctaactcatggcctcaagtgatccctccaccttagcctctcaaagtgctgagatgacaggcataagtcatagttcttggccatctactcttttaaataatccacacaacagacatctatttctttttttgagacagagtctcgtcctgtcacccaggctggagtgcagtggtgcgatcttggctcactgcaacctctgcctcccgggttcaagcaattctcctgcctcagcctcccaagtagctgggattacaggcacgcaccaccacacccagctaattttttctatctttagtatagatggggttttaccatgttggccaggctggtctcgaactcctgacctcatgatccgcccaccttagcctcccaaacagctgggattacaggtgtgagccactgcgcctggcccagacatctatttctaatgcagtaagctgggtaataagactgactctcttgctgaaaacgatgacaaatcctgcataaaatctgaagtccatgttgttgaaacaagaaaggcctgacaattagtagttatcagccccaaataaataagtgaagtcaagaatttcccagaggtaacctgagcatctaccagagcattaaaaccacttttgccccaagggcatctgtctaacccatggaactgctgcttcaagttttatggcctcctagggagcaggggtggggcaaagtccagggtacacacgtgttagaaagtctcaaaggagacacaccactccccaagtaggatggggccccaataggctatcactttcaggtaagaaacctgaagttaatttactcccgtctttccattcccagagatttttgaggaagttactttggcactttgcagaaaaggagaaaaacaaaagtttttgagaaattataaccacaagctggcttttgcagacactggtgacctaaattctcaacacattgttggtctaaaagtctaagatggtcctagactgggagtttcccagacacctggaaaaagtaaatgcaaattgtccatggagggttcgccttcatcgcaggcctcaatgaactcccttcaacagtgtcccatggatgccgggcacggtggctcacacctgtaatcccagcactttggggggccgaggcgggttgatcacttgaggtcaggagttcaaaaccagcctggccaacgtggtgaaaccctgcctctactaaaaatacaaaaaaattagctgggtgtggtggcacacgcctgtaatcccagctactcaggaggctgaggcaggagaatcatttgggcctgggaggctgaggttgtagtgaactgatattgcaccactgcactccagcctgggcaaccaagcgagactctgtctcaaaacaaaacaaaacaaaaaatagtgtcccatggaaaatgagcttcacacaaccaaagataacaagacattcaagaaaacaaggcaccagaatgaggaatcacaggaaacaagagacagcagaaaaaaagccataacaattttagatacttaagttattggacactgattataaaaattcttcgcatattatgggctttttttagatttagccttttcttttgcatattatacttaaagaaatgtaagacatgcttgaaaatacctatagaacaattctcaagtgggggcgtttctaccctccatgggacatttcgtttggcaatgtctgagccatttttggctgccacaactggggaggggctgctactggcatttagtagggtgagaggccagggatgctctaagtatcttagcacagggtggtagctcacggccaagaattacctagcccaaaatgtcaattgtgccaaggttgagaaatcctgctgtaggaaaacaatactgcaaaagatgaagcaggattaaaaaagatcagacagcttgtaggaagaaaacaattctaatacttggaattaaagacatagtgggcgtggttaatagcagattagacatagctaaagaggcaactggtaagctggtgagagacaggtaccattattctcctcatttgacaaataagtaaactgaggcacacagagagccagcatcttggtttgctgggaaataaatcacaaattggcatccacctaactcaagatctgtgctgttatccactctgccattctgtttaaacccaagggaatggtgtcctctctctgcctgagcctctgaatgtcttccccatttgctattttctttggcaaaatattttagggaaaatagaatttgtctaaaaatgcctgacagaagaaaggcacattgtgttgcattagcatgcaggcaacaatgcctagcggggaaaaatggcacagcaatttccgtctctaaaacatttaccttccattaactaattatggcccacagttcatagtcaaggggcttgggggtgtttatctttacacagacacagggaaaatggaagaaatgcaccgataaaagtggtcccccccagggcatgcgtggtggctcaggcctgtattcctagcactttggggggccgagatgggcggatcacctgaggtcaggagttcgagaccagcctgaccaacatggagaaaccccgtctctactaaaaaaaattaaattagccaggcgtggtggcatatgcctgtaatctcagctactcaggaggctgaggcaggagaatcacttgaacccaggaggcggaggttgcagtgagccgagatcatgccattgcattccaggctgggcaagaagagcgaaactccatctcaaaataaataaataaataaataaataaataaataaataaataaagagttccccctatgagctgctagaagctggaatgcagggtccagggccgtcccaaatttgcaaccctagagtcttcagctgcaggatcttgggcaagttacttcctctctctatgctttgatctctctctctccataaaatgtggatcatgaaaaacaacccttttaggattctttccaaagatccaaggagatgtgtgttaagggcatggcacataacaactgctcagtgttactggtgattacttctattgcagaagcaggaaaacacagtggtaaaaacaaacaaacaaacaaacaaacaaacaaacatacacacacactctgggatcacactcctgggtctgaatcccagctctaccactccgtagctgtgtgacctttggacagttacttaacctctctgggcatcggtttcctcataggtaaaatgtggataataacaggttgtttttttttgtgtgtgtgacagagtttcactcttggagtgcagtggagtgatctcgactcactgcaacctccgcctcctgggttcaagcgattctcctacctcagccaagtagctgggattacaggcacctgccaccatgcctggctaatttttgtattattagcagagacagggtttcaccctgttggtcaggctattcttgaactcctgacctcaggtgatccacctgccttggcctcacgacgtgctgggattataggcgtgagccactgcgcagggcaagagctcttatcttataggctctttagaagattaaatgggttaatatttgtaaagggctcatagtaaatgctagttgttattctcatcacaatttacctggattattaggctgatgagtgcaatgcagttgaactgaagttttacaagggcagaaagcaggcctgtcttgttgaccgatgtgtcatcagggcctagcacatagtagaacctcagtgagcaattttggaatgaatgaagtatttcctttttacctgccaatatccccaaatgtaacaaaaaccatgactaccatttgctgagaatctaccctggagcaggccccctagtgggcatattacacggatcatctcctcgcatcctcaaaacaacgctgagacaggtggcatcgttccatttcacagataaggaaaccgcaggtcagagtggccccgcagcctgtgaagggaaaagccagaattttcgccacgtccactgggattcccaaatccaaatgttcagctactttctgccaccagtgtttccttcaacctgcgatccgctctcatggatgtcacagccaatcacgtagaccccgagagccctcatgtttgtatttctttgcttctaccatatgttccccctgcttcttactgaagaatagaagcagttcaatgcctcagtttccctactcataaaaggaggaaaacaacagtggtgttctcagaatggccttgaggacggcacaggtgaatcacgcctcaaacagagagagcctctgcaaatggaatagcctctctaccacttgcctatgaatccccccaccaccttgaccctcgggcacacatctttagatttgctgaccaccttctgagctgggtctcgctcctctgcccattagctttctttgcccaagctgatttatctgtcatttctccccctccagcctctatcactgtgcgtacacacacacacacacacacacacacacacacacacacacccctctttctctctcttcttgcagcctcttcagccactaaaattagctccatctctagtccacatccccagcacgcctgtcctggtttctctgggctcccagccacttgcgatattgtgtctcagatgccacacgctgcctgcctgatgtcacagccgcttcctaaaacaagaggtattttgagatcttggagggggtgggagcggggggaagggagggatttcacacatcttcctcccggggtgtttttaaaaaacgctgacacgagagatgtgtgcccccctcactgtgcccctcactcctatttttagtttcaaagcgtccaaaaaaaaaaaaaaaaaaaagcttcagagccaatgagacctctaagggccccagtgggtcaaatcttgatttaaaaaaaattccacttctgggtctatatccaaaagaattgaaagcagggactcagctatttgtacacacaggtttacagcagcattatttacaatagccaaaaggtggaagccaagtgcccatctggatgaacagataagcaaagtgtggtccatccacacaatggaatacgattcggcctggaaaagaaggaaattctgactcatgctacaatatggatgagactggaggacattatgctccacgaaacaaaccagtcacaaaaagacaaatactgtatgattctactcacaggggggacccaaagtagccaaattcacagagatagaaactagaacggcgggtgccaggggctgggggagtggggagtgtggagtagggtggggggagtggggaggggggaagggggagtcggggagaggggaagggggagcggggagtgagagtttcctgggggcagagcttcagttttgcaagatgcaaaagttctggagatggatggcggtcctggttgcacaacaatatgaatgtacttaacgccgctcaactaaacacttaaaaaatggtacattttatgttatgcatatgttaccacaatgaaatatatatatatattttttgagacagagtttcgctcttgtggcccaggctggattgcaatggcatgatctcagctcactgcaacctccacctcccgggttcaagcgattctcctgcctcagcctctcgagtagctaggactacaggcgtgcaatgccacgcccagctaatttttgtatttttagtagagacagggtttcatcatgttggccaggctggtctcaaactcctgaactcaggtatctgcccgcctcggcctccccaagtgctgggattacaggcgtgagccaccattagaacaatgagacaagcaggtcaggaggagatagcacatggacagggggtgaggatgttaccacctagtcatggcaggggcttgatgcccctggaagattttactggcacaattcatattacaaattatttagtgaatacttactatgtgccaggctgtgttctaggctctgggggaatagcagtgaacaaaacagacagaagtccctgccctcatggagctggcattctagtgggggcaggggattggcaataaccaataaacaagtaaatatagcttggcagatgctcttcaggggtgtagagggaaattaagcctagaggcggggagtggggtggcacagtgcaggtgaggcagttacatgttagaaggacacttgagcaaagacccaaaggaagtgaggggggagccaagcagatatctgggggaagagtgttccaggcagagggaacagcctgtgcaaaggccctgaggctggggagtgcttggtgtgtaagggacagcagggaacttgtgtagctgaagccgagtgagtggagaggagagtgggaatagagggggatgggggatcacaggggcagagtttgtgggtccctgtgaggagaatttgggctttttctccaagtgaggttgtgagcaaagaggagccaggtcctgactcagtggctcacaggtgccctctggctgctgtgtggggaacagtcctgggggtggggcaaggactgaagttaagagaccagattggggtggaggggcaactggtttagtccaggccagcaaagatgggggctggaccggggtggggctgtgaaggtggtgagaggtgggtggtggattctgggtagattctgaaggtagagccaataagatgtgctaacagattggatgcagggggtggagaaaaagaggcatagaggcatagaggaagatctggaggtctgaggccagagcactgcagggggttaaagccgcctttacctaaacagaaaatagggcaggaggagcaggtttgggtgacggtggtcttttggaggagctgtaatccctctaacacctcagagtcagctgcacacccatgttcatgacagcactcttcacaatagccaagatgcaggtacaacccaaatgtccatcagtaaaggaatggatgaagaaaatatggcgtgtatatgtacacaatgaagtactattcagtctttaaaaaggagcaaattccatcttttgcgacaacgtgcatgaacctggaggacattatactaagatgaaacaagccagacacagaaacgcaaatagtacacaatctcgcttatatgtgagctctaaaaaatttgaggccgggcgtggtggcccataatcccatcactttggaagcccgaggcaggcagatcacgagatcaagagattgacaccatcctggccaacatggtgaaaccctgtccctactaaaaatacaaaaattagctgggcgtggtggtgcacacctctagtcccagctactcaggaggctgaggcaggagaatcgcttgaacccgggaggctgaggttgcagtgggctgagatcatgccactgcactccagcctagcaagagagtgagactccgtctcaaaaaaaaaaaaaaaaaaaaaaattttaggccaggtgcagtggctcaacgcttgtaatctcagcactttgggaggccgaggtgggtggatcactggaggtcaggagttccagaccagcctagccaacatggtgaaaccccgtctctactaaaaatacaaaaattagccgggcctggtggcaagcacctgtaaccccagctactcgggaggctgaggctggagaatcgcttgaacccaggaggcggaggttgcagtgagccaagatggcaccattgcactccagactgggtgacagagcgagactccatctcaaaaataaataaataaataaataaataaataaataaaaattaaaaatttcaaaaaataaaaaatttgaacccatggaagcagagagaatggtggttaccaggggctggtggtggagggattggggagatattaggcaaaggatacaaagtttcagtcagacaggaggaatacgttttagagatcttttgcacagcatggtgaccacaattaatgataacgtattgtagtgtatgtttcaacgtactatacaacataatgtaatatacaacataaggtattgtatatttcaaaattgctaaaagagtagattttaagcgttctcaccacaaaaaataagtatgcgatgtagtggatatgttaattggcttgatttaatcattcaaaaatgtaaacatatatcagaacatcccattgtactccatgaatatatataattaatttttcagttagaaaaaaagtcaggctgggtgcagtggctcatgtctgtaatcctagcactttgggaggctgaggcaggaagactttttgaggccaggagtttgagaccagcttgggcaacatagcaagaccccgcctttataaaaaaacttaaaaattagccaggcatctggctcatgcctgtaatcccagcgctttgggaggctgaggtgggcggatcacgaagtcaggagatggagaccatcctggctaacacggtgaaaccccgtctctactaaaaatacaaaaaattagccaggcgaggtagcaggcacctgtaatcccagctactcgagaggctgaggcaggagaatggcatgaacctgggagatggggcttgcagtgagccgagattgcgccactgcactccagcctgggctacagtgcgagactctgtctcaaaaaaaaaaaaaaaaaaattacccaggcatcatggcgtgtgcccatagtcctagctactcaggaggctgacgtgggaggattgcttgagcctgggaggtcaaggctgcaataagccatgatcacaccactgcactccagcctcggcaacaaagcaagacgctgtctcaaaaaaaaaaaaaaaaaaaaaaagtcagctgaagaagatggacccccagggacatggaaactggtttgcacccagagccttggatcagggcctgcattgtggggaagtgaccttggtctggctggtaggcgggggatgcaggtcagattattgacctgggctttggtgtctcatctgctaataagggatgcaaaaagccccaacctcagaatctctgggaggcaccaatgggagaattcttgcaaagggctcagacagcccttccctgcatagcacccagcagaacaagagcaagtataagtattagcaatggaatggttgcagtgtgtctagctaacctctcctgggcaacactgcatcatccagtggccatcccctgggaactaagtcaagcagcaaacgtctggaaacagggtctttactttccagaatcagataatcacagaatcagcaacctctactccatgtattgagtgtggcagttaagagcttcgacactgaagtcaagcttcctcatttaaaccccaattccaccacttcctagccgtgtggcttggggcaagtcctctagcttttctgaacgtcagttttctcatctgtaaaatggggagattgagagtgaatgaaataatccctgcaaagccctaagggcacagcctggccacacacatgttatatctgtgttcactattgttgttgttattattatttttagagataagttttcgccctgtcacccagggtgcagtgcagtggcgtgatcatagctcactgcagcctcgacctcctgggttcaagtgatcctcctgtctcggcctcctgaatagctgggactacaggctactgttattactgataccttcatttgtcctgtgaaataggtacaatgagcccctgagatattaggttggtgcaaaagtaattgtggtttttgccattacttttaatgtactttggatctgtgtctgtccgcaaccaaatcttatggcgaattgtaatccccaatgttggaggtggggcctggtggaaggtaattggatcatgggggcagatttccgccttggtgctattctcgagatcgtgagtgagttcttgtgagattggacatttaaaggtgtgtagcatctccccactctctctcttcctcctgttctggccatgtgaggacacctgctccagctttaccttctgccatgattgtaagtttcctgaggccttcccagaagctgagcagatgctgccatgctttctgtagagcctgcagaatcgtgagtcaattaaacctcttttctttataaattaccccagtctcagggtttttatttatttattattattattattatttttacaaggtctcactctgtcgcccaggctggagtgcagtggcataatcattgctcactgcagccttgacctcccaggcttaagcaatcctcccacctcaccctcctgagtagctgggaccacaggcgcgtgccaccacacctggctaatttttgtacttttagtagagacaggatttcactgtgttgcccaggctggtctggaactcctgggctcaagcaatcttcccaccttggcctcccaaagtactgggattatgggtgtgagccactgtgcccagccaggcatttttttttttaattttttaaaaataatttgttttttgagatggagtctcactctgtctcccaggctggagtgcagtggcgcaatcttggctcactgcaacctctgcctcctgggttcaagcaattctcctgcctcagcctcctgggtagctggaattacaggtgcatatcaccatgcctggctaatttttttttttttttagaagagatggggtcttgctatattgcccaagctggtctcacactcccaatctgcccaactcagcctcccaaagtgctgggattacaagcataagccatcacgcccagccccagccaagcatctcgttatagcaatgtgagaacgggctaatacaggccccaattttcagatggggaaactgaggctcagagagacaacagtcttgccagaggtcagcagagcagcagaggtgagcaggaagggtgctctgccagcctgtcctcattttcccagatgtacactggggacaatgacggcacctaccaagaaagatgtgcctggaggattaaatgagataatttactcaagatattgagaatagcactaggtacaaattgtggatgaatgttggtgtttatcataactccctcgggtcactcggctgggcactggagaagcccatgactgtctgactgcagggtccagctccttattacagagctttgctgctgaacctacaatttaaaaacacacaaggctttacttgtttttgttttgttttgttttaagatggagtctcactctgtcatccaggctggagtgcagtggcgcagactcagctcactgcaacctccacctccccagttcaggtgattctcatgcctcagcctcccgagtagctgagattacagggatgcaccaccaaacccagctaatttttgtatttttagtagagatgggatttcatgatgttggctacgctggtcttgaactcctgacctcaagtgattcaccagcctcggcctcctaaagtgttgggattacaggtgtgagccaccgtgcctggcctgcctttgcctgtttcttcagaaaggacaagggaatgaaaaatcagggattgttccctgagccttcgctttttcgaagcactcagcattcctggtgcccaaggcttcccacattgtccccttggctggtacagctgctgaggcgagtgtgattctgaggttggggctttttgaattccctgtttgcaaataagagaggaacctcagctgctcctgaatccacccagagcaggctgggcagtccctgtttttctcctcctgctacagaacaacaggactggaattaagtatagctcttcttccttctgtccatcccctagcaatgtctgggcaagcctaacaaaagccatgaagcctgtattatcagctatgaattcattcattaattcactcattcattcattcactcactcattcattcactcattcattcatccactcactcattcattcactcattcattcattcactcaatcacccatttatgcattcaacagatttttactgaaccccattctcaagttctacacgaggctctgtggttctgtctttaccccccagaggaaggagacagatgattaaccaaatagacaacattaagaggattcacactgatgccacagatggccataaagaggggacctaaactggtatcatagtgggcatgcagtggggagatcagggaaggcttccttcctggaggaagagacagtatcatatcagtaaacatgtacttccttgaggcctgagagtgcccctttggcaccttggcccctcttcaaggcccctggactgcccccacaatgcagcaaacaatgagtacacatgtggcacaacaggggaacctcttttcaggttagctggtgtccctgccacctggatgttaaatactttatgtatcatgtctgggtaagaattaagcagatacagaggagggagcatatctcagacacaggcacacagcatgtgcaaagtccctggggtgagtgggcagaagctgctcgtggagaaggctggtgtccctttccctattttctccctctaaaatttgacagtggacagaaggaagcctggttctacagtggggcagagctgtgtccaaatcctggctctagccacacagaactgtgagaaggtttgaagatgataagctatgtaaaggatctaagacccagcagatgctcagttcatgctctctgaagttgatctctacgccggcctcggtttccataaacctaacactgcagaagggaagagaggtggaggcagctaagaaaagaaaagggccaggtgtggtggctcacgcctctaatcccagcattttgggaggctgaggagggtggatcacctgaggtcaggagttcaagaccagcctggccaacatggcgaaaccctgtctctactaaaaatacaaaaattagccaggtatggtggcgtgctcctgtaatcccagctactcaggaggctgaggtgggagaattgcttgaacccaggaggcagaagttgcagtgagccaagatcacgccactgcactccagcctgggcaacaagagtgaaaccccatctcaaaaaaaaaaaaaaaaaaaaaaagaaacaaaaagagttggggcgggagggagaagagttaaggtctccacatagacacccaaccagcctggcctctgcccccacctgagcccctgagccaatggaatcagagccaggtttccatccagctctgatcaggagtgggtaacatttcaacaaacaaaatccaaagccccagtggacagagggagccaggttgcgtgtctgtgcatgtcagcatggcagacaagaaatctcttcccttgcacgccaaccacctgtgagggttcagaactcagatatcacagtgagatttgataaaagctggaagcatctgaggaggctgtgtaatcattcccacttttctttccagcttgctgtatgatgggccctctgctctcagcagagtttttgctgacattttttcctccttttctctgtgcaagtgacacagtaatgacacgtcatctacattgattgctgagggtcagggatggaaaggaatctgaaaatatgctctgagggcccacagaagtcagggcaaaaggccccagggaacaggaatggggccccagtggccccaggtaaataccagatgggctctgttgccccattccttgaatctggaccagcttcattgcttgctttggacaacagtggccaacacgatgttgtgccattcctgggactagcccttaagaaggctgaacacttcctctttctcttagaatcccattgctgccacgtgaactagctcaggctagcctgctggaggatgaaaagctgccatgtgaactagctcaggctagcctgctggagggtgaaagaccatagggagtggagcacagtcattccagccgaggtcatcctggaccagtctgcagccagctaacagccaaacagaagagccacccagctgacccgcagctgaccaaagatgcatgaatgagctcaactgagaccagataaagcacccaactgggcccagcctaaactgccacccttcagaatcatgagctaaataaatgcttgtcattataagccactgggtcttggggattgtttgttacacagccgtattatggcaatatataactgatgcaaaggagcatacagaagaggtaaatatgagttacactaagacagagttttaaaataaaatatcctgattttattttattttgattataggtgcacgccaccacacccgactaatttttatatttttagcagagacgggatttcaccatgttggccaggctggtctcaaactcctgacctcaggtgatccacctgccttggcctcccaaagtgctgagattacaggagtgagccaccatgcccagctttctctttcttttctgactatcctgttcccctgtttcctggtattgccaaacaaaccacttgtcctcaaattttttttttttttttttgagatggagtcttgctctgtcacccaggctggagtgcagtggtgcgatcttggcttattgcaagctccgcctcccaggttcacgccattctccttcctcagcctcccgagtagctgggactacaggcgcccaccaccacgctcagctaatttgttgtatttttaataaagacggggtttcaccatgttagccaggatggtctcgatttcctgacctcgtgattcgttgccctcaaatctttgtctcaggatcagtctgggttctgggttcttcttttttctttttttttttttgacggagtctcgttctgtcgcccaggctggagtgcagtggtgccatctcagctcactgcaagctccgcctcccgggttcacgccattctcctgcctcagcctccccagtagctgggactacaggtgaccgccatcatgcctggctaatttttttttttttgttttgtatttttagtagagacggggtttcaccacgttagccaggatggtctcgatctcctgatctcatgatctgcccgcctcggcctcccaaagtgctgggattacaggcgtgggccaccgtgcctggcccagtctgggttcttgattgcaaaaccaaacactgaccggctatcttaggcataaaagggatttttaggaaactcagataatcaacagggggccagaagaggggatttgggaaatcagcaggaacaatgtagccagcctgaccttctcctgtagcaggaggccatgaaagagtccaaaccatcatgtttggatcacttggtccattttcaaattcctgggtaggaaaacgtgactggttgagttttttattagtttgttttttgagacaggatcttgccctgttgcccaggctgggctggagtgtagtggcactatcacggctcactgcagccttgacctcctgggctcaagcaatcctcctgcctcagcctcctgagtagcggggactacaagcctgtgctaccacccccagctaattaaaaaatttttaagagataggggtctcactatgttgcccagtctggtctcaaactcctgggcttggctcaagctatcctcctgccttggcgtcccaaagtgctgggattacaggcgtgagccactgcgcctggccctggttgtttaaatcacatgccctgactaccaggtgatggggtgacaatgaatccctttcaccttcaacttattagtgagggtgggatcccatagaccagcagtactttatagaaaggggaggattctccctaaattggaaagggaggtcagatattgggaacccaactaataatagcaaacgttccctacagttaactaactggtctatggaactgggcctggggaagtagtaataattattatcatcattataatgatagttattagtcttacaatagctaatataattgagcacttattctgtgccagtttttgttctgaatgccttatatgtatctcactgacttttaccttttgaggtaggtgcaattattattcccattccacagatgaggaagctgaggcccaatggactatatcactttctctttcttcagactgtccctgggcaagtaacatccataaacccagcccagcatgggtcagacattaactcattgaaccttgaaaacaactccataaggtggtagtattttgttgttgttttgtgttttgttttgtttgtttgagacaaggtctcgctctgttggactgcagtggtgcaagcacggctcactgcagacttgacctcctgggctcaagtgattctcccacctcagcctcctgagtagctggaattacaggcacacactatcacacccagataatttttgctttgttttgtttttgtagagatggagtttcaccatgttgcccagaatggccttgaactcccaagtttaagcgattcacccaccttggcttcccaaagtgtttggattacaagcatcagccaccatgccccaccaagtcaggggatgctactactctcattttccagatgaagaaatggaagattcagggaggtacagtaacttgcccaaggtcacacagcttggaaacagtggagtcaggttgggaatccactctaaccccaaagaccaggtcttaaccactatgcttccttacgtgtctatgtagactggctgtcctcatttagagatgcctgcacaagaagcagctgggttgcaaagcaatgtttaaaaaaaattattttttgagacagagtcctattctgttggccaggcatggtggctcacagctgcaatcccagcactttgagaggccaaggcgagtggatcacctgaggggagaagttcgagatcagcctggccaacatggtgaaaccccctctctactaaaaatgcaaaaattagccaggcatggtggtgtgcgcctgtaatcccagctacttgggaggctgaggtgggagtgcttgaacctgggaggcggaggctgcagtgagccaagatcgcgccactgcactccagcctgggcaacagagcaagaccctgtctcgaggaaaaaaaaaaaaaaaaaagagtctcggtttgttgcgagtccagtggcatgatcttggtctcccggcttcaagcggcccaccaggcagccacctccctgccctggtgagaggagaggagtcattaggcatgcaaactgtagaggcagtgggacagatgccccttggaggcaggctggcatttgtcatagcaattcgagaaaacaagacctcagtcggcccccaaacctgcggagagatggatggcaaggtcttctccagccccacagggaaaatggccaagaagctcagtatggaacaaggtcacctggccatctggcctttactcagtccctctccaccccagctggaggcagagggagggaagagaacattttagcacaatacggtgtgctgggagctgtccagggtgctgaaacctgtaacccgctaagcttccaacttccgctccttgagttagcgccgagtagaccccaaggcaaaaactagggtccaatggttaatttgggaggtaatgcaaggaattacaagtgaggaatgaggaagagagagattggtaaagggtacactagtgaatgggttttatgtgaacaactaggattcaattttactgaggcacctctatgatgctgtataacatatttcagtgttttcccactgagcaatggggaagccagggtatttatacactgactccctagctcactggttgagggatgctaccgaggttgttaagcatctggctcagcaaactctgtgatgccagagactgccctccaacagagatgtagagagatgggagtgtaccaagaggaagctgcaggtgaacttagacgtaagctaggtaaataaggcatggagaatttgtagcatctatcacatgctcccccacaagaatttaagtttttttccttcagttcaccaactttcgtgtgtgatgcaaaccctaggagctaggcactagttttactccctttttccaggtgagaaaactgaggttcagtgagttcaacccacattctcactgtcatagagggaggagcttcctctgactctgaagtccaggtcttaaccatggcgctaggccaatctctcatttcttgaaatctcttctgctcctgttttcccccagccatagtggaacccaagatcagggaggggaaggaaggatcaccctgacttcccatgtcagagagctctattcaaattctcaagtttattttccttggcaaacttgaccttagagaaatagcgtaggattcaagaaaatgggttctagatccagatctgccttagttcaaatcctgggtccaccacttatgagacagatgctctggcttgaatatttcaaaccttccaaaactcatgttgaaatttgttttatttattttatattattatttattgacacggggtctcaccctgtcacccagcctggagtgcaatagtgtgtgtgcattatagctcatgcagccttgatcttaaactttccagtctccataactgtaagaaataaattgctttttctttataaattactcagtttcaggtgttctgctataagcaacagaaaacagactaagacagtaagcatttaatgtctttgagcctcagttgctccatctgtaaatgggaataataatagtatttatttaaccttgagagttgaaataattttatttttatttttatttttagagacagtcttgctctgtcacccaggctggagtgcagtggtgtgatcatagttcactgcagcctcaaattcctgggctcaagcaatcctcctgcctcagcctcctcattagctgggactataggcatgtaccaacatacctggccaactgaaaaaataaactttttacagagacaggatcttgctatgctgctcaggctggtctcgaactcctgggctcaagtgatcctcctgacttggcctcctaaagtgctgagattataggtgggtgcctatgtatgtatataatatatagtatatcatattgtaagcacctcataagtttcagcttatcaatgttgccactgttgttaataacaggcattacattcctaaggacactgggttgaatacagctctttgctgaacttaacacaggcccagtattattctaggtttagagaagtgtcctagcagagaggctgagatcctgatccaccccttaccagctgtgtgactcccttgtgagcagcttaacctctctgagcctcagattcatctgtacaaaggctagcgaggctcaatgtgataatacacataaaactcttaatgtagtccctggcacatagtaagtactcaataaatgataagaataacgaccatggcagctaacatcattattatcactgtcactgctggtgttgttagaagatggaagaaaatagctcctgctgctaggaagtgatgtggttcctggtgaaacatggtccagcaaatatcatgacaaccaaaagctttgaacaataaaaagatcgatgctctctcaatggtataactcactgagaatgacaaaaagcatttgtgtcacagtggggaatccttttggtaccaaggatgactgatccatggaggggagaaactactgcagagagacattaaaataaaatgctgctggtatttataggaactgttgctggtctcatgagttagaatgctggttgtgttttgttgttgttgttggaatgctgtttacatgtgaaggcaactaagagcaggtgcatggggcaggggtgaagaaagaaaggaggtaagaagcaactacatgtatttattcaattaatcaaaaaggagagaggacatgagaggtgtatggtcaagacactgacccctctgagacttggtttcctcaactatataataaaaagcgaggaactgggattattctctgaggatccctttcttattctctggaaagaggccataggctagtcagggggcaagaggaaggaagagagagctgggctctagtggcagaacctgaggggtgatattaaacatttataccacttccattgcccaaaaagccagggttcctggctccatgacttgaagacaccttcttattctagatctcttgccaccatctctgtgtgactttggacaaaccacttgtttgtgagtaaaacagaagggctggacctgccagaatccatggagccttaaaatccaatgatgcggcccggtgcggtggctcacgcttgtaatctcagcactttgggagacagaggtgggcggaccacctgagggcaggacttggagactagcctgaccaacatggagaaacctcgtctctactaaacatacaaaaaaattacccgggcttggtggtacatgcctgtaatcccagctactcagaaggctgaggcaggagaatcacttgaacctgggaggcggaggttgcagtgagccgagatcatgccattgcactctagcctgggcaacaagagaaaaactccgtctcaaaaaaaaaaaaaaaaattcaatgatgcttcaagaccaaaaaacaacatctttccctgatggttcctgtgtagttgtgtcttttccttgcctctgatcttcaacaaaatggcccaaagcctgagacagtttatagacccttctaaaaaggaaccttccgtttcatagagtcataaaatgtcagagctggcaaagacccagagcttctctgtcttatatctcatctgatgttcagggcatctgccatagacttctggactatctgactatttctatcagtgtgttggtcccatcttctaaacagcttagtaaatttcccaggacactcattatcagaagtgttacccttttccggcttaacaaccatttattttactgagcatttattatgtgaaagggacagtgctaaccctgtgaataaaaaagaaaaaaaattgtgctcacccctctctggtgaggttcacagtctcttttcttaacatgcacgatttgtgttatttgatctcttcaatatttatatatatttgagaatgacagtaaaagaactgtcatctcagacatacagccaagcttctgaaatcttcctcttacacattttcagtttcatgatcagaacacaaatacaataaaaacatgccttacaagggtttgacaacattataaagttaggatttctctgaggctctgagttacaaagaacaaacagatgtccggggtaagatcttttccaccaaacttcacccaagaagaaggtaaacaccgtggtggtccacacaaaatgaatcacgttttaacgctgtggtttgcttcaggaatctgagagggcaacaggttaatcagaaagtactcattaggccgggcacggtggctcatgcctgtaatcccagcactttgggaggccgaggtgggcagatcacctgaggtccggagttcgagaccagtctggctgatagtgtgaaaccccgtctctactaaaaatacaaaaattagccaggcacagcagtgcatgcctgtagtcccagctactcaggaggctgaggcaggagaactgctggaacccaggaggtggaggctacagtgagccaaaatcccaccactgcactctgtcccgaaaaaaaaaaaaaaaaaaaggaaagaaagtactcattaaagtcatcactgtctcaatgtcaaattaatatatttgagtcccctcctctctgaaacatagaattaagtgtctactgtgtttctctaccattgacattggcagaaggctaggtctgcatgatgtgtgtgtgtgtgcgcgcgtgttttttctttctttttttttttttttttgagacagagtctcactctgtcatccaggatggagtgcagtggcacaatctcagctcactgcaacctctgcctcctggattcaagtgattctgctgcctcagcctcccaaataactgggattaccagtgcacaccacaccaccatgccaggcttttttttttttttttttgtatttttagtacagatggggtttcaccacgttggccaggctggtctggaactcctgacttcaagcgatctgcccgcctctgcctcccaaagtgctgggattacaggtatgagccacagagcccagctgggattttttttttttttaagacaaaatctcactttgttgcccaggctggccttaaacccttgggctcagggaatcctcccacctcagcttccagtagctggaattccaggtgcttgcccgctgcacccagctcatgcagaatgttttactttcccctccctgttcctagcttacaacccaacaggacactaaacagcaccttggaatttggagtaataaaatttgagcaatgtgcctcatttgaaggagatagaaccaccagacaaaaaggataactgactaccagagaaataagagcaagaaaagcaagtgaaagaaatgcatggagaattcaacaagaaaggagaaggggatgtgaaaggaacccaatctagaatagaaggtcttcatgataggatcaggattccctgagaatctaataaaaactacagaccagaaaaaaaaatatacatatacacaattttcttcttgcataaaatttcagtgggttcattcatcccaacgatgagctctcacccttaggacctatctgttctagatgaagtatttctcctctagaggaatgagtctagaatctcttccatcagatgacaggaaactagaagaaaggccaccttgttgtaagcagggagatacaaacacaagtgacaaactgacctactgaatgactgccttcagtttaatgatcacttattgggacccactaggtgtctgtattagtcaaggttcttcagagggacaaaactaacaggatagatgtatatatgaaagggagtttataaggagaattgactcacacaatcacaaggtaaagtcccacgatagcccatctgaaggatgaagagcaaggaagccagtggtggatccgtcagagtcctcaaacctcaaaagtagggaagctgacagtgcagccttcagtctgtggccaaaggcctgagagctcctggctaaccattggtgtaagtccatgagtccaaaagctgaagaacttggaatctgattttagagggcaggaagcattcagcacaggacaaagatgaaggccagaagactcagcaagtctactctttccaacttcttctgcctgcttttattctggccacactggcagctgattagatggtgcccacacagattgggggtgagtctgcctctcctagttcaccggctcaaatgttaatctcctttggcaacaccctcacagacacacccaggaacaagactttgcatccttcaagctgatcaagttgatgctcaatattaaccatcacactgctcaataatatatgagcttccctaagtgttcccataaccgtgttattatgaaaaaaaaaaaaaaacagggctgcaaaagcccatcaatgatagactggataaagaaaatgtggtacatatacaccatggaatactatgcagccaagaaaaagaacaagatcatgtcctttgcaggaacacggacggagctggaggccattatccttagcaaactaatgcagaaacagaaaaccaaatactgcgtgttctaagtgggggctaaatgatgataacacatggacatacagaggtgaacaacacgcactggggccttttggagggtggagggcgggaggaggaagatgatcaagaaaaataactaatgggtactaggcttaatacgtgggtgatgaaataacctgtacaacaaacccccaagacacaagtttacccatgtaatagatctgcacttgtacccctaaacttaaaataaaagtaaaacaaaaaaaaccacacagggatttttaaggctccttcctgccagcaaggtcaagccagcctcagccagcagaagccagcccccagggagcatgaattggcacaaccactttgcagagcaatttggcaatacctagtggggctgaggatgcacacagtatacaactcagcagttccactcctgggtacgtgccctagagaaactcacttgggagaaagcagggacactttgggtcaaaatagcccaaagctggaaacaatccaaatagataaatacacggcagcatactcctaccacagaatactatgcagtcatgaaaatggatgcatggaaactatttttattaatcagatttatctcatgttgaacacaaaagtcaggttagagaaatgtgaagtttgaaaaacagtaccacatatctctttttttctttctcttttcttttttttattttttattttattttatttttttgagacaaggtcttactttgttgcccagcctggagtgcagtggtgcaatcacggatcactgcagcctcgacctcctgggctcacgtgatcctcccacctcagcctcctgagtagctgggactacaggcgtgcgtcatcatgcctggctaattttttgcattttttttatagatggggtttcaccatgttgcccaggctggtcttaaactcctggactcaagcagtcttcctgccctggcctctcaaagtgctaggcttacaagtgtgagccatcacacctggcctttattaaaaaaacaaaaaaacaaaaaacaacaacaacaacaaaaaacattttttagggacagggtcttgctctgttgcccaagctggagtgcagtcatagctcactacagcgtcgaccttatgggcttaagtgatcctcccgccttggcctcctgagtagctgggaccacaggagcacaccaccatgcccagctgaatattttattacattttatttcattttgtagagacagggtttcactacattggccaggctggtctcaaacttctggcctaaagtaatccttccatctttgcctccaaaattgctaggattacaggtgtgagccaccattcccagcccacatatttcttatctatgcatgtagtcaaagtgtaaactattctcactctgatgctatttaaaaaatattttgaagtgtaaaaataggtagcatatatttcttatatacttaggcagccaaagtgtgaatacataaatgcaaataataaacataaaattcaggaaagtgcccctggatgggggagagaaaggaatgggtctagggagggagaaaacagggattagaaaggttagaaaggttttgttttgctgggcacagtggcttacgcctgtaatcccagcactttgggaggccatgccaggtggatcacttgaggtcaggagttcaagaccagcctggccaacatggcgtaaacccgtctctactaaaaatacaaaaattagctagatgttgtggtacacgcctgtaatccaagctacttgggaggctgaggcaggagaatcacttgaaactgggaggcagaggctgcagtgagctgagattgtaccactgcactccagcctgggtgacagagggagactcttgtcaaaaaaaaaaaaaaaaaaaaaaagagaaaggttgtgttttgatagcaggttactccattacttctctatccccaattctccccattcttctggtcaccttctctagccatgtgggtcttcttactgttgatcaaacatgtcagatacagtccagcctcagagcctttgcactggctgttccctttgcctgacactctgttccagctctcctcatggctcactcactcacctcccttaggttttcattcagatgtcacatgcccagtgaagtcttccctggcttccagcacccctcacccctgcctgccacacatcccatccctcccctgctttatttttcctctgtacccctcaccgccatctgacacactagattcattcatcaattgtgtccatctccatcagtagactctcagctccatgaggacaggggatttttctattttgtttactgctgtgtcccagagcctagaacaggacctggcacacagaagtgttcaataaatagtcattgaataaatgaatgtatacacaggtgtttgctctattattctctacttagttttgcatgggatcttgctaggttacccaagctggtctcaaactagttaggctcaagcaatcctctctctccagcctcctgagtaattggggttacaggcatgtgccactgtacccagctttatacacttttaatttttattttgtggagatgtggtcttgctatgttgctcaggctcgtctcaaactcctgggcccaagcaatcctcccaccttggcctcccaatgtgctgggatacaggcatgagccaccctgcccagctttacattttttaaacaataaaaaagttagccactaggctgtttctagatgagtttcctagtagactaagagaaaagtgcccagtaccataatatgcccttggaacccaccaaggtcccaagccaccgaactgtgagcacagccaacaaagatccctctgtgaacacccaagcccatgagagctagcccagagtccttacaacagactgctgacatctgaaggcctctacagaaacagcccaataggccacagctccttctgtgagaggcaacattgctctgaaacaaatctgcattgtgagagcccggccagcacagtgtgggtgctgcaacccatcacatccgccaagagagacagaacctggagcagcaacaaaacatggaaagctatgatcctgtaaatgattactatgaaaaaggtgtccagtgaagaagggtcttagaatagaagagcccagacttagctgagaggagagtagagagtgggaagaggaggaaccagccattggtaccagatactaatgtccctactggaatctaataaaagtttttaaggtccctgacagactagtaggtcattctccaaatccatttcccttttcttctaagcacaatctgatacttcccagcttcccttgcagtgatgtgtggtcatgtgaccgagttctagccaataggatatgaatggaacaggtatgggtcacaccccttccaaactcataaacctttccaagtatcaccttctatgctcacttctccttcctggtttgatacagacaagcatggagttattggatgatgtgggctgacaatgaagagccacaatatggcaagggtcagggtccgtcagtcattggaggagatgagcctgtcaactaggaacaattattttggacttttttttttcgagatggggtcttgctctgttgcccaggctggagcacggttggatgatcatagctcactgtgccctccaactcctgagctcaagcaattctcccaggcatgtaccaccatgcctggttaatttttattttattttatgttttacagatgggggggtggtctcactgtgttgcccaagctggtcttgaactcctgagctcaagtgatcctcccacctcagcctcccaaagtgctgagattacaggcatgcaccaccacacccagctcaattttgaattttctatgagtgacaaataaacttctgccgtgtttaagtcatttcctagctttggatcttttgttataccagcaagtgctacctcatacagggtgcttagaggaaagcatatacacatttcaaccacagttcatcatatatggatctgaaaactccttgaagacagtaactgtaccttatttagcttgcttttctcctttgtcataatcacaatcccttgcacccagacattctcaaaaaacattcaccaagttgaaataaaagcaagatatcctcaagcaaatcaagagacccatgcacgtacaacacttaaaaccttgagttctggaatgcataatcttctgttcatctcccagttccatcacttacttgctgggtggccttaagcaagttacactctgagtttctgattcctcagtggtcagatgggaatattaatatttcctaattcagtgggttgttgcaaggattaaattagagaatgggcataaagcactctggaagcagccaacaataatgagctattattttaattgtaacagaaagcatctgctgtaatatacagctgagacatggaggtggggtgttggcagaaaggaggcaggcgcataacaaggggagggagaacacaagggctcagccttcctgagcctggcccggaccacaccaaccaaaagcctcgtaatccttcagctagttaaatccaaagcgtatagcacgcgccacttaccccgttagcaccaccacaaagtccatgacattccagccattcctcaagtaggagcctttgtggaaggcaaacccaagggcaatgattttaattccagcctcgaaacaaaaaattccaatgaagtatggttctgtgtcatcctggaagggagagaaggcaaggtcagcgtcttgggctgggcagatgttgacaagatcagggaaccagcccacctagaaatcagtacctatcaccctctcacttcccctgaccctcctgcactcaccacccctcactgcctcttgcagagttctcttgtccaaagccttttgcgagcaaagccaatgcctagagaaggcaccttcctccttcattccttttgggccaacctcacatatcactcagctaaacagaattatttgtttgcacctgtcttattcaatacgacagtcacaggccacatgtggctatttcaattaaaattaatttaaatgcaataaaataaaaaacacagttctgcagtcacactggctacatttcaagtgacaatcctattggacagggcagatggagatcatttctgtgactgcagaaagttctaatggaaagcattggtttagagaatttacttgtcacatgcagcgttcaaggtatttgaggctagagcttgtgcattgacctcactcctaaatctgaccccttaggatggttctcagctggcatgtagattgttaaaggtttggaataggacttctgtactggctgataagtggccagtatcctcacctccagttcctctgcagaacctccggctggttctggcttccagctgctaatctatcatatttgaaattaagctacaagctcttctccatcagagccccaatgtgaatgttttcccatctgttacagcaacgtttctcgagctacaatcattttcactctgcctgaatgattttttttttccacattagcttgccactggtacttctacttgcttaccagtctttcaatggacgctttttatttagctttattttaagtgaaaatgcaaagatctagaaatcataggtttgctaggctagttatagtttttagaagactgtgacattgtgaaatgtatgtttggtctttgacactgtttcctggtgtacagctcctaaaacccttgggatctccaaagggatgtctttttgcaggctaaggattgactgatggctggcagcttctaggtagcttcaggatgggggttggtcaccgggaaaaccaaggcatgattagaggtttggatttaaatcattgaccgttggtgatcaacttgattttcagcccctctgccctcccagaggttggggggtggggctgaaagtcgcaaccctcgaatcatgccttggtctttctggtgaccagtccccctcctgaagctacctagaagctgccagccacacccttctcctatatctcaccctttgcatctcttcatctgtatcctttgtaatattcttgtttcttttttttcgcctcccccccaccaagatggagtttcactcctgttgcccagactggagtgcaatggtgcgatcttggcttactgcaacctctgcctcccgggttcaagcgattctcctgcctcagcctcccaagtagctgggattacaggtgtgcaccaccatatccagctaattttgtatttttttagtagagacgggctttcaccatgttggtcaggatggtctcgaactcttgacctcaagtgatctacctgccttggcctcccaaactgctgggattacaggcatgagctacagtgtctggccaagacataattattaacattaacaatgttcatttgagtatactgcctgaaattatgtcagatgccaaagtgggcagtttgagaccagcctaagcaacctagtgagatccccatctctacaaaaaaagataaaaataagaaaattaactgggcatggtggcacctgtagtccctgctactcaggaggctgcagtgggaggatggcttgagcccaggaggtggaggctgcagtgagctatgactgaaccactgcactccagcctgggtgacagagcgagactctggttcaagaaaaaatgaaaaggaaatttaggcttcccatgatctggctctgggctccaggactgagagcctcctctgtgccctgctccactcccccaaaaattaatgtcctgctaaagccaaggagaagaccctgagaaaagacatcactcaccagccgttcagacatcggggtcttgtcatcatcaggcagatgctgctccagtgcgaggacgatgcaattcgctatgatggtggctaaaatcatatattcaaagggagtattggggaattaaggaaaaatcttgttcaaagaaaagaagggtgttggaggtgcacccacccccactgaccccagtggaaagatctcaagccctctagatccttccaactcatcagcacaggtggaattattcgttctcctgtctggagtagatccctgcagatctcaaacccagatcaggtgacttctaaagggaaatgtggatattcaccttctatctcacccacaatattcactgaacacatattcattcagtacctgctgtgtgccagactctgttctgggctagggacacagttgagagcaaagcagacaagaggagaagcttcctcctgcttcccagaggagaagcaaataaatgagatgactacatcatgtatactatgctatacagtacactgcatataccatgttatacagtacatcatatatgctatgttatgtagtaagatggtgaagactatagacagtggaaggggtcagggctgcaatttcaaatatggtggcagggccagcatgatggcaggcacctgtggtcccaggtacttgggaggctgaggcgagagaattgcttgagccgaggaggtagaggctgcagtgtacaatgactataccactgcactccagcctgggtgacagaaggaggccctgtctcaaaaaaaaaaaaaaaaaaagagataaattaaaaatagatagaggctgcggtgggtggatcacttgcggtcaggactttgagaccagcctggccaacatggtgaaaccctgtctctactaaaaatacaaaaattagccaggcgtggtggtacacacctgtagtcccagctacttgggaggccggggcaggagaatcgcttgaacctgggaggtggaggttgcagtgagccgagatcatgccactgcactctagcctgggcaacagagcaagactccatctcaaaaataaataaaataataaataaataagtaaataaataaataaaacattatgatcagatttgacacctaatgcatgatccacagaagaaaaaacagatatgctgggctttatcaaaatttaaaccttttgtgcatcaaaggacgttatcaagaaagttaaaaggcaagtaacagaataggagaagctatttgcaaatcatgtatctgataagggtctagtactatataaagaacatttacggccaggtgtggtggctcacgcctgtaatcccagaactttgggaggccaaggcgggtggatcatgaggtcaggagatcgagaccatcctggctaacacggtgaaaccctatctctactaaaaaaatacaaaaaattagccgggcgtggtagcgggcatctgtagtcccagctactcgggaggctgaggcaggagaatggcgtgaacctgggaggcggagcttgcagtgagccaagatcgtgccactgcactccagcctgggcgacagagcgagactctgtctcaaaaaaataaaaaataaagagagaacatttacaacacaacaacaaaaagataatccaattgaaaaatggacaggaggctggaatagacatttctccaaagaagacagtcaaatggccaatatgtacatgagggtattagtgatcagggaagtgcaaatcaaaccccaacgggatactgcttcacatccactaggatagctattaaaaacaaacaaacaaacagaaaacaagtgttggtgaagatgtgaagaaattgaaaccctcatgctggtgggaatataaaatggtgtagctggccagatgcggtggctcatgcctgtaatcccagcactttgggaggccgaggtaggaggattacttgagcacaggagtccgagaccagcctaggcaacaaactgagactctatctctacaaaaaatatgaaaaattagccgggcatagtggcgcaggcctgtagtgccagctacttgggaggctgaggagagaggattgcttgagccccaggaggttgaggctgcagtgaaccatgactgcaccactgcactccagcctgggcaatgggagtgagaccctgtctcaaaacaacaacaacaaaaacaacaacaacaaaaaaacaccagtgcaactgccatagaaaaccattccttggttcctcaaaaagttaatcacagagttaccatgtgacacacagtaactccactccaaggtataaacacaaaaggatcgtaagacaggtattccaacgaacactcatacacaaatattcacagcagcactattcacaacagccaaaagatggaaacaacctaaatttcaccagtgggtgaatggataaacaaaatgtggtctactcatagaatggaatagtattcagccataaaaaggaatgaagtaggccgggtgcagtggctcacgcctgtaatcccagcactttggaaggccgaggcaggcagatcacctgaggttgggagttcaagaccagcatgaccaacatggagaaaccccatctctactaaaaaaagtacaaaattagctgggtgtggtggcgcatgcctgtaatcccagctactcaggaggctgaggcaggaggattgcttgaacccgggaggcggaggttgcagtgagccaagattgtgccattgcactccagcctgggcaacaaaagcaaaactccgtttcaaaaaaaaaaaaaaaaaaggaatgaagtactgatacatgatagaacaggaatgaaccttgaaaacattatgccaagcgaaagaagcagacataaaataccccatattgtatgattccatgtatatgaaatatcccgaacaggcaaatccagagacagacagcagatttgttgttcctggggaatggcaagggaaatgggagtggctgcttaatgttttagaactagatgaaggtgacagttacacaacattgtgagtgtactaaacgcctctcccctcccctctcctttcttttcttatttatttttacttttatttttttaaagaaacacaattttgctctgtcacccaggctggagtgcagtggcatgatcatagctcaccgcagccttgaattcctaggctcaaacgatcctcctgcctcagcctcctgagtagctgggactacaggtgcacaacaccatgtgtgcctaattttttttttgtaagagacagagtcttactttgttgcccagggtggtcttgaactcctgggcgacctttcttcctcagcctcccaaagtgcggggattacaggcatgagccactgtgcccagccctaaatgtcactttaaaatggttaattgtgttatattaattttacctcaataaaaaaaaaattacagtgatcagggcagacctctgagaatctgttcttccaagacccgaggcaggggaggggtcgtccagtaagtatctctagatgccccatttgcattctctccagtttgcataggtaaactcctccctgcatcctgggaactgtcatttgggtttaggaggcctccctccctagtgtcccaccagaggatctgcagggcaggtggggagggtctatcttgttcatttcatattagctcctaacctgctgatcagctggtaaatgggaatgtccgctgtctccctgccacacccctcagaagtgtcccacgccaacaggctctgcatatggatctggcaatctctgaggaggtgtaagcgctggagaagcggctgcttgagtgaaaaagccatagggtgttggttactccggagcaggatttcccaacctcagcactaggtttaggggtggatcattctccttggtggggctgtctgggcactgcagcatgttcaacagtatccctggcctgtgtgtgctagatgccagtagcagcccctcctgtccagtgatgacaacctcaagtggtctctaaacattgctgagtgtcccctgggggcactgaaatcccgcattctgtagagagatcaattagtatgtcttggggaacttgaccatgctaaacctctcccctcctcgtagctctaacctttggaaaattaattggtttcagtctcctcttctgccctggagttaggtttggcattttggaagcaccataaaaccatcccttccaggccggagggagagtggaacctgctttccaggtgggaaaacggagtctgaaatagaaaccccctcagtaaaagtctcggaaagccaggaaaaccaggcttccttttgtcaccagcttcagcctttgcctccagctgaaagcacactctgaaaagcaaaatccgagactcagggcaatttggggagccaacaaaagccggccttgccgacgatcatctctgattggctttctgcctctgagctgacaggcattaggagcccagagaacaaagctgggctgtgttgcacaaatactccactctgcctcaccctgcagcctggaaaataagagacaatatttgtacacagagcagcaacgccaagcccttccctggtctcctctcgctatgatttgaagctgacttcgctttctctccctgccaactcagcctccttacacgcgcttctgccatcccactcctccggttccctggtctcctgcccctcaatggcagggatgtgacttcctttggaccggctctggcactgaaggttccaggaagagtcccagaagtccaccatgcagcatgcagcacttttatgggctgcaatatcagggtttcaactggccagtgttgcctggatttcagacccagggctctctgggtatggcaataaaaccttagcacgtaggcaaaaataaagaggttctactctcccaccttgcttcattttcttacttcttatcaaacacagatactcacactgcttttccaacatcatcccccctccctctgctcacccgcacccccgcaagtgtccacagacatgccccagatggacatctgcaacaatgacctcagacccttgctactcaaagtgtggtcccagaaccagcaccggttaggaatgcagccttagaccttgcatccacctgctgagtcagaacctgcatttaaaaagatcgccaggggatttgtgtgcaccgggaagtttaggaagtgctaagtgcctctatttcagggataggaggaggagctcaggtaattgcggttttgagtcatccagaaagaggtgggggttcctgtttctcctccaagctttctcctccacgttctgaccccagggggagaactgaacagccctgggtaccagccttctgctcccacttgggtaaagagcctgagaagaaaccgaagattttgatgaaataaaagcaatgttggaatgcgacaaaagcagaaaagaaaatttcagcctaatgcatgtggaagtattcaaagccttcccatggatcccatctcactcaaaagcaaaaacaaagtccttccagcaccagcaaggtgcatgacctgctcccattacctccctcccctcatctcctctattctctcccttagtcactcagctacagcaacgccggcctcccttttattccccaaactccccaggcacatttgtacccaggggcctttgtacctgctgttcattctcctggaatagtctttccccagacatccacatgactccctccctcacttcctttaggcctttactcaaaggtcacatccatcaacccccttagcctgcttatttttttctttctttagtccccgtccccagtcaagcatctgctatttttttccttctttatcttgttccctgtctctcccacgagactgcacactctatgcacgtggggattttttgtctactttgttcactgcttcatcctctgtgcccaggagagcattctctatatagtagatgctcaaaaaacaccagtggaagggcctggtgcggtggctcacacctgtaatcccagcactttgggaggccgaggcgggtggatcaccagaggtcaggagttcgagaccagcctggccaacatggtgaaaccccgtctctactaaaaatacaaaaattagctgggcatagtggcagacgcctgtaatctcagctacttgggaggctgaggcaggagaatcacctgaacccgggaagcagagtttgcagtgagccgagataacgccactgcactccagcctggacaacagaacgagactccgtctcaaaaacaaaacaaaacaaaacaaaacaaaacaaaacaaaacaaaaatcaccggtggaggaaatgaaggaaggggacatgggtcctgctgcctagaaaccccgacttcatctcaagccaagtctccatgagcatgttaaggacacaatgaaaccccctgaaatatgcaatgatgtacttggtgcccagatgaaagaaagatgggctgctgagttcttggcatggtaagagatgcctcgcccgaggcagaagccaaaggtttcactgggtagtcgagctggggggcaggcgaggctttctcagcccaacctcaagtcatgcctgatcctcccgatttagaaagcctgagttctaactcacagctgcggtgagcaatgcctctgttagctgagctgagcctttctgctccctgattggctcggagagaaagcacctgtgtcagcgggatccagaaaaatcagccatcctaggaggccaaagcggggcgggggctgaaagaagagaagcatccctgatgggaggaaaagctggcttccgaaatggctctcggaagtcaggatagcagacagccctgcaggcaggtgaggagacacagagctctatacacaatgaaattgatcaggacctgcagaggccccagagagaggctgtatgtgaccctggaaaagaccaagtttgactctgcgtagggaagaaggagggcttgcatctgagaacaggaccttgctcttcagattcagaacatgaaggaaaattctcaaagtgggcgtggctgatggttcccatcccttagcaagaccttgcagtgtccaagtaatccttgcatccctctgtggtgcccttcaccctcatctcatttcaagcctcctgtggttggtgcggaaatcaaatcaggtttgtcaactctttgtgaccttgtctccactatggggactgctgatgggtgggttctaaggaaacagatacttgtagcagttagccaggtcattgagcttgtgtgaagaagccaaacagacctcattttcatgtaagttccatgctcatcacaatcaccaggaaaaagagtagagggtaccagaaccctagatatatgggtttaagacatattccttggtccattaaacacataccccaatttcactctgcaatatgatcaactattatggggccattaacaagcacagcgaccataattacagctgccttgtttccaactgcttctttgggcagataccgtggtaagcactttgtttcagttaattccttgcaacatttctacaaggtgggttctgtggtaagcctcattttccacacaagaaaatccaggctcagagagattaaacaaattttcaaggtcacataggaggtactggcagagctggggctcacacccaggtctgcccaactccacagtctatgcctttttttgtttgtttgtttgagttagggtcttgctctgttgcccagggtgaaatacagtggcacgatcacagctcactgtagccttgacctcccaggctcaagcgatccacccacttcagcctcctgagtagctgggactataggtgcatgccaacacacctggctaacttttaacatttttgtagagatgagggtctcaccatgttgcctaggctggtcttgaactcctgggctcaagcgatcctctcaccttggcctttcaaagtgctgggattacaggtatgagccactgtgcccagcccacagtctatgcttttaagctggtggtccccaaagaccactcaggagctatcctggttagaagatagatgggtttgcctttatttaaaaaaaaaaaaaaatagaatgcaggtgcacttggggccctaaccatatggattagaccaaatgggttacacctcacccaagtcccaaccaatggccacagtttagtaaaggccaaccattgcatgctagtccacgccctcataagcccatctcaagtaggaattattcatgactatttcaacttcaaacaatccaaacagtctccagttcccagacatgggctttaaaatcttcaacacacagttctaaccaaaatgaagcctggaaaagatctctccactcgctgatcagcctaagactcttagcagggatggcatgctaacaagggcaaccctagcgctgcccgggatgttttcagcaccacggccagcggcaaagaggcacaagtttaatttcacttgcacccagggatgggaatccccggggagagaaaacaaaaccagcagcaactattaacactctctgagacatctgcaaagacctacatttcacatacagggtagaggcaaaaaagattaatcatgtcatcaggaaaatcaaatgaagagaaaattaaaaacagtatcaaataggtttgtgtgtcatttgtttttcatattatccaacaatgtccaacactttggttctgaaatgagaagtctactcagggctgctaaatcatgcttctgcttagaaaactggcaatatctgcactaaaaaatagtagtgcagaggagttgaaaggatttggggatcagacgtggccttgaccttgggcaaggcagtttccttctctgagcctcagtttcctcatatataaaaggtagaaaatagcatcaacctcataggttgtgtgagaatggaatgagctgatacacacaataatctattacagggccctgcatatagtaagtgctcaaggaatgtgagtgttttatattgtttattttggttcccatgatgactagaaaatttaatgtgggccaaatgcagaggtagatgcctatcatctcagccctttgggaggccaaggcagaggatcgcttgaggccaggagtttgaggacagcctgggcgacacagcaagatcctgtctctacaaaaatacatttaaaaataagaaaactagccaggcatgttggcacatgcctgtagtcctagctactcgagagactgaggcaagaagattgcttgaacctgggaatttgaggctgcattgagctatgatcataccatggcactccagtctgggcaacagagcaagaccctatctcttaaaataaataaatacatacatttttttaaaaaagaaaacttaatatgcttataaaaacaggatacaatttatctcattgtaatcatgcaataaatgttcattactttatgacaattgctgctaatagtaaataacttttccaattttttttttttttttttttttagagaccgagtcttgctctttcgcccaggccagactgcagtggtgctatctcggctcactgcaagctccgcctcccaggttcacgccattctcctgcctcagcctcccgagtagctgggattacaggcgcctgccaccgcgcccggctaatttttagtatttttagtagagacggggtttcaccgtgttagccagggtggtctcgatctcctgaccttgtgatctgcccaccttggcctcccaaagtgctgggattacaggcgtgagccactgcgcccggccaacttttcctatttttgcccttctaggtcttggttccttttcttttctttccttttcttttggtttcttttcttttctcttctcttctcttttctttttgagacagagtcttgctctgccacccaggctggagtgcaatggtgcaatctcggttgactgcagcctccacctcctgggtgcgagcaattctcctgcctcagcctcccgagtagctgggactacaggcgtgcagcaccatacctggctaattttttgtattttttagtagagacatggtttcaccatgttggccaggctagtcttgaactcctgacctcaagtgatctgcccacctcagcctcccaaagtactgggattacaggcatgagccaccgcgtccagccttagttccttttcttcaaggagggagggaagggacaatacctaccgtcatcatagctgaacagacctctcaaatctgaaatgtttccaagaacatactgcagtgcatgcatatgtgtggtccactcactgaatattatactcaaaataaatgttgccaaaaaaaatcttcattggacatttcatgtaaatggaattaaacacgatgttgccttttgtgtctggcttctttcactcagcatcaacttttttgttttgttttgttttgttttttgagatagggtctcactctgttgcctaggctggagtgcagtggtatgatcatggctcactgcagcctcggcctcctgggctcaatcgatcctctcgcctcagtctcctgaatagctgggactacaggcacatgtcaccacacctggctagttttttgtaaattgttttgtagagatggagttttgctatgttacccagggtggtcttgaacacctgggctcaagcgatccgcccacctcagcctcccaaagttctgggattacaggtgtaagccactgtgtccagccacatcatatttttgaggttcatctatgttgtagcaaagattagtatttcattcctttttaaggcagactaatatctgaggaaggcatatcacacttggtttatctgttcatccatggatggacttttgggatatctcatcctgttgactacctagaataggtaaatccatagagacagaatgcagatgggtggttgccagaggctggaggaaggtggtggggaggggagaaggagagagactgcttaatgggtacaaggtctcctttaggggtggtgaaaatgttctggagctagacagaggtggtagttacataacagttggagtgcagtaaatgccacagagccgttcactttaaaatggttaattttctgttatgcaaattgcacctgattttttttaaattccattttggttttgcttttttttttttctttccccttgactctctcctcagggttcccatcatgggcctttactcattgcactttaccctgggcgacacagtgaggctctgtcctttttttttttttttccttttctttttttttaagacggagtcttgcacctaacctgggtcagcacccaggctggagtgcatggagtgcagtggcacgatcttggctcactgcagcctccatttcctgggttcaagctattctcgtgcctcagcctccctggtagctgggactgcaggcacccaccaccatacctggctaatttttgcatttttagtagagttggggtttcaccatgttggccagactggtctcgaactcctgacctcaagtgatctgcccacctcaacctcccaaagtgctgggattacaggcgtgagccaccatgcccatccgagactctgtcttttaaaatactgctgctgctgctgctactttcttcaataataataataataatcatcatcatcatcatctgaccacgcatccttgtgcacttgtgagaatttttctgcagaataaattccgtgatgtgaaattgctgattttttttcctctgagccctcaaccatttagagaagcatgatatggacggttttcaagagtccttccctctctcttttaaatttccattatttatttatttatttatttatttatttatttatttgtagagatgggtctcgctatgttgcccaggctagtctcaaactcctgggctcaagctatcctcctgcctccccacctcccaaaacactgggattacaggcgtgagccactgcatccagctacagggaagttaatgttttaataaaagctggaggaggcaagggaatgagccctgtttctgtctgggagaagagtaacccaggaggggaagcagccagtacaaagaatgtgtgtgggaaaaaatttgaaagacaaacacgaaattgctagcagaggttatctctgggaggtgggatggggtaagggcttttcaccttctaaatgacacactacacattttttaagcttttaaaaaaccacacaaaacaacaagcccatattcttttcataattaaaacctttttttaaaaaaagggggatgccaggcatggtggctcacacctgtaatcccagctactggggaggctgaggcacgaggatcactcgagcccagaaggtcaaggctgcagtgagctgtgatcacttcactgcactccagcctgggtgacacagtgagaccctatcttttaaaatgataataataactatctcaccatacatccttgtgcacttgtgataattttcctgcagcataaattccaagatgtgaagttgctggatgtcagaggggatgcacactgactttttcttttctttttttttttttgtgagacagagtctcagtctgtcgcccaggctggggcgcagtggggtgatctcggctcactgcagcctctgcctcctgggttcaagtgattctcctgtctcatcctcccgagtagctgggattacaggcacctgccaccatgcccagctaatttttttatttttagtgaggatagggtttcaccacgttggccaggctagtctcgaactcctgacctcaggtgatccacccacctcggcctcccaaagtgctgagattacaggcatgagccaccatacccggcccacattagatattttctggatatttacagggctatattttacagtttttaaaaagtgagatgagtgagtgtgtgtgtgtgtgtgtgtatgtaccttctgaaattaaatccataatttaaatgtataaattcctctgggccaaaaagtttaaacatggaagaattaacatgactcatggaaaacacacaaatacacaaaagtaaaataaagatcccttgatgaaaacagaaagaaaaaacaaaacaacaagccaagttttaaacaaaaagtattaatcaatttcagactctcggggtcgggaagagagtgaggagtgaggatgcttcagtgtcagattccaaacaagaactgaagaccttctccctgtttatctttttttctaggtcagtaaagttctctagggacctctgagtggtgtgaggtctctgtctcctgattcaattttcaaccactttcccttatatgttcactctaccaagggggaatccttttcctctctggcaatagtgacatccctgttcagtggtcagtaaaatcctccatttccctggtctctctctacacagtccatctacttcatggtttaaacttaaacctggaggtcaggcgcagtggctcacacctgtaatcccagcactttgggaggccaaggtggccggatcacttcagatcaggagtttgagaccagcttggtcaacatggtgaaaccctgtctccactaaaaatacaaaagttagctgggcatggtggtgcgtgcttgtaatcccagctacttaggaggctgaggcaggaaaactgtttgaacccaggaggcggaggctgcagtgagccaagatcgtgccgctgcactccaacctgggtgacagagcaagactctgtctcaaaattaaacaaacaaataaaaaacctttaacctggaaattccctgcagaccatcaactctaagaccaaggtggggccactggcagcctcaaattagttcctaagaacaaaaggaaagctcagctctggaatatgtccaccatcatggcccccagaaaaaccagtgagaagggccccaagaaagcaagagaatcaaagaaagaccttcccaactcagataaggtggaaaaggtgcccccaagaagtcaggtgaggtgaggagggctccctcaaaagcaggtgtagccaagaaggcccccaagaaagtcagcaaagccaaggaagtcttccttaaaccagccaatgccatgaaggtccctcccagtgctgctgggctcaatgggaagtccaaagtcagaggtagcaccagcagccaagatcctgagatccacaggaaaacagaagctgggagctaagactccgacggaacctgttaacatttgatgacctccaatttccctgtggagagaccattgtccatgctggtcccctgcttccttgatcactggaggatgtccctacctcttcatcaataaccaatgtctcctccaagccactccagctatgcatgctcagaagctacaccagccacctccaaaacacctgtttccagcatccttgtcttgaaccacctcttttttttttttttttttttttttttttgagacggagtctcgccctgtcgcccaggctggagtacagcagctccgcctcccgggttcacgccattctcctgcctcaggctcctgagtagctgggactacaggcgcccgccaccacgcctggctaatttttttttttttttttgtatttttagtagagacagggtttcaccgtgttagccaggatggtctcgatcgcctgaccttgtgatccgcccgcctcggctccccaaagtgctgcgattacaggtgtgggccaccgcgcccggctgaaccacctcctctttaaccacctcccagctcactaactcccttaaatgcaaaccaacgtccatcccatcgagccctgcaacccactgaccccgccatttctcaggaccctctcctgccttgtcaaccttacataggttgattatatcgcactttcttgcctcctgtttctctcctggaaaaaatccatccctgcatgaactcaactagttgccttccccatacctgggcagtggagcattcctgaatgagatcaactatctgggctggtgacattaaattcatgatgctaaactcaaatgggcatttgagaatcccagcatcctatatcagagaagacacccgtgcatattggtataatggatgggaatgacccaatttacagaaatcaatattcttccatcattaaaacctccacccttgactgaaaattttccttcagccaccaaccaatttctctactccccttcatgaagagttgccttcacgtgttcctgccacttcctcactgcacattcttctcctaccctccccaggctggtttctagcccccatcactcaaccaaaactcttccaaagaggatcaccaaagacccccaggctgccaaatcccagggccatttttctgtgcccagattacttgaccatgcccttcttaatgttgttctagttttcctcctatcctcctggtctctacttctcaatcttccctttttgctcctctttttctatccaatctctaaatgttggtcttccctggggcttaatcctaggtaatcaccctttatctatctctatcctctttctagagcttgcatgcatttcgatgtattttgccattctcttgttgccctttctccctaaaatatccactcattgccctgtttggcatcctggtagaggcagggctgacttctgtgactgcatcatccaagccctgcaacgctgccctccaccacatcttctgccttctgggttggcttggccaacgggaggcaccagcaagagatcagagaggagggggagttggggcatttctccatttgatttcctccctgctacagtgtgtggtcttagcaatagctataccactctgtgtcttcttagagcatctcataggagtgtctatattagtctcctagggcagtcatgacaaattgccacagattgggtggcttaaaacaacagaaatttattctctcgtcatcctggaggcaaggttctgaaattagggggtttcccttcaaaggctctaggggaggatccttccttgcctcttcccgcttttggtgcctctacatgtcttttggcttgtggctgcagcactccattctctgcttctattgccacatgactttctcccctgtaccttctcatataaaagcacttaccatggaatctcgagtccactgtaatccaggatgacctcatctcaatccctgactcaatgacatctgcaaagatcctactttcaaatgaggtctcaggttctgaagttccaaatgcatctgaatttttggtggacaggattcaaaccactacagtgtccaaggcccaaactcttccattccctccctaatcccatgtctctttctctattaacctttgttatgaattgtaccaccagctgcctagtaaggagctcaatcaggtaaggttaccctaagagaccttcccagttcctacatcttcctccccctacagctgatgtatcatcagaccccaccaattctacttccgaaattagactttgaatcctcctgctcagcattgcctcttcagcaccacccaaggtcaagccactgtcccttcccacagaaatatctataatctcagtagactccaaagtggtctatccatttcattctccagagagaagccagggcattatgctaagtgaaagaagccagacacgaaaggtcacacagtgcctgaattcatttatatgaaagagccagtataggtaaatccatagaaacagaaaacaaatttgtagttaccaggagtggtgggggttggggggataccgggaggggaggatgaggagcaactgcctcatggatacagggttttctggaggggtggtgatgaaaatatttcagcactagaaagaggtggaggttgtacaatattgtgaatgcgctgaatgccactgaattgctcattttaaaatggttaacttatgttgcatgaatttcacctcaatacaaaaattattttattgagacaggatctcactctgttgctcaagctagagtgcaggggcacaatcacggcttactggagcctcaacctttggggctccagcaatcctcctacctcagcctcccgggtagctgggactacaggtgcacactatcacacccagctaatttttaatttttatttttatttgtagtgatggggtctccctatgttgcccaggctggtcttgaactcctgggctcaagtgatcctcccacctcagcctcccaaagtgctaggatcacaggtgtgagccaccatgcccagctaaaaaatatatagacaggtagatagatatgtatatatgtatacatatatatgctttatatatgtaatattatatgtttgtatatatgtatatatatttaaagtaaagcagttctgtcccatcccacttaagcttctctgaggacttctcattgcatgtagaataaagttcacctccggaacttgacctagaaggtcttgtgtgacctgtctctgccaacttcttgggtgtcttcccacctgtgagtccctttgctcatcagactctagctacactggctcatttttaacatgatgaacttgttccttccccagggcctttgcacatgctgttccctctgcctgggattctcttcctccctctgtctcattctgttcacactctgctctgtgcttaacaaccttcaggtcttcacttacgtggtacccctgtacttctaattatcctctacgcaaagggcctgtagtaggttacttattttattttatttttcagagatggggccttgctctgtcacccagcctaaagtgcagtggtgcaatcatacccatgctttagcctctggagcctctggccatgaccttatttagtaaaacggcctctgcaagtataattaaattagagatctcaagatgagattgtcctggattatctgacgggctcaaaatccatcgacaaagatccttataagagacagaagaggccaggtgcagtggctcacacctgtaatcccagcacttcgggaggctgaggagggaggatcacttgagcccagaagttcaagaccagtctgggcaatatagtgagatcccatctctatcaaaaatttaaaaattagctgagtatggtggtgcacgcctgtaagtcccagctgctcaggaggctgaggtgggaggattgtttgatgctgggaagcagcagttgcagtgagctataattgcactgctgtactcttgtacagggtgacagagtgaggccctgacaaaaaaaaaaaaaagagagagagagaagaggaagagaagacactgacatgaaggagaaggccatgtgaagacagaggcagagactgcagtgatgcagccacaagccaatcaagccaatgtatgctaacaactaccagaaactggaagaatcaaggaagcattcttctctagagccgtccaagggagctcagcactgctgatgccttgattttggtcttccagccttcagaactgggtgacaatatatttatgttgttttaagccatatagttcatggcaatttgtcctggcagccctaggaaacaaacacaggaccctgctggttttctcccaaacacttaccacaattagtaattatgtctgtatttgcctattccttattttatgccttcttttcctgttacaagttccaggagggccaggaggaaccacatctgtcctgcccactgtcatgtccccaccatgtacatcccagttccaggcacatggcaggctcccccccacccccctgcctcccaaaatgtttattgaatgagcaaatggatccacctctccttcatttctctttacatctcagcggcagtccttcttgcatcttccaccttcacttctaactctgagctgttgcattagcaactccagttaaacagattttctggaaagccccggcctcccaatgaaacctccctcacttgctccccactgcacttccccaaatatttgggtctgcctcgccttttccatcactggttctgccatccatgaagattctccttgaagctttatcattaaaaaataaacccacatattctgtgtctccaaaagaagcttttacttttgcaaactctattgatttaatcctagaggctgctggcagcagtcccaggagcttaatcaatatgacaacacccagcgcagacagaacatcaaggagcctcggccaagatctcctgctcgggtcttcactgaccccgactgaatctcttacaaccatgaagacagatttacagtagggggcaggatatttgcaacagctccaggatcttgcttaggtgagcaaaaggaaatgcctccaagcttgaggcgcttcagagctatttgttaatttgcgactatggccgattcccataagactcaaggaagatggaagacaacaacagaaaaacattgcaggttctagaacctgattataaactccctggtggggtgagcaggggaggaacaggcaaaggggaggtgggaaaaagaagatgaagatgtcaagagttaaaaatgcaaagagtttgccaggtgtggtggcttacgcctgtaatcccagcactttgggaggccaaggcgggcggatcacaaggtcaggagttcgagaccagcctggccaatatggtgaaaccccgtctctactaaaaatacaaaaattagccgggagtggtggcagacacctgtagtcccagctacttgggatgctgaggcaggagaatcacttgaacccaggaggcagaggttgcagtgagccaacatcacaccactgcactccagcctgggcaacagagggagactccgtctcaaaaaaaaaaaaaatgcaatgagttaaaacagacattccttcaccccttagcagacactaagtgaccagagaaggagaaaaaaaggtcatagaaacaaggaggttgagaatgactaaatcaatgccccaggctttagaaaccattaatctcctcgaaggagaagtcaaacacttctcacattttattcaagattgaaaaacaggaaaattagaagcactataggaagaaattggaaagcaagaaatatttgttaatcagaagtttacatgcatgtgacatttccaaacctattgagcccttataggaaaatatgaatatccatccctaaaacatacatcaacataatcttcctggagacactgtgattagatatcagccccaaaatgcagataatgaggtatacagtcagcctagtctatgtcctgctgcagtaacaaacaatccccagatctcagtggttgaacacaccccaggtctatttttctactcatgctatgaagtgggatggggactgatctatgtcatcctctctccagcacttactttgagagagggtccatctttgtgcatccatgacagtggaggcaggaaaaaggaaacatggtgaatcccatgctcacccttaaggcttctgtccggaaggactcacgtcacttcccctcacatttcattgatgaaaccaaatcacacagccatacctaacttcagggaggtggggaaaatgacactctactctgtgcccagagaaaaacaagaaatgttagctgaacaaggtaaaggataccccctcaggaagatcatatgacttgcccaaagtaaagcagctttgaaggtgtcagaagtgggacctgaattcaagactaaatggtccatgtctttttgcactatcaccctgaacttggcaggagttgagaattaaatctagatagcagtgaagagaaacatcaatggaggcagggggcagaaggaacaagggaaaataatacatcaagtaagggagaaataaaaggagccagaaaattacaaccagaacataattaaaggagtttcatctttagaaaccaaaacacattgtgaaaagtagggaaaaagtgggggagttttacactcttttcagggagaggcaaacagtaacgggatagtgcaggggtttatatgaggctatataaggaggcggggacacaaccatgaaagaaacttgtacacttcttgttcttcctctgaagctgccatcttggctcagactgaaggtccaacaaatgctagttggtgcaacagcagctcaggaagctggggccagggcttaccaggacttccatcagctgcactgttcctccctggacattttcctgctcagttctgggaaatctggacaagagttggatgatgttccagaacagatggtgctagcttggttcttctgatcattcctcccctatccctaacccaagccagactggaagtaagaagggatcctggttctgccaccctcccggccagcaggtgagaattctacacagccaggtaggtcagtttagcactagagcagggattctggaaggactcaccatcattgccaactcatcatcaccatttcagttttgagcacctatgatatgccacctgagtactttctgtgcatgaatgcattgagccctcaccacctgtctgcctagaaatcctactggtcaactttcaacttatatccagaattagtagtttccagaagctgggggaagggagaaactggaagtaactactaatgggtgcagggtttcctttaggggggatgaaatgttctgagattaaatagaggtgactgttgcataacagggtgactgtagtaagtgctgtggaattgcacacctcaaagtggtaaatttcattttatcacaataaaaaaattcattttatcacaataaaaaaacttaaaaattataaccagaatccagccactcattattatctccacagacaacaacctggttccacccccactattacctgccaggaccaacactgtcacctccttcctaattccccagcttctgccctgcctgcccccaaccttcaaagtctgttcttttcacagcagccagaggagcctatgaatatctgagtcaggtcacgtccctcctctgctcaaaagccctccgtggctcccagctccctcagagcaaaagccaaagtcctccccgcagcccataaggccctccaaaacctgtcccgtcacctctctgtccttatccttgcaccttccctctctcttgctcactggcttcagccacatctgcctcctcactgtcacacatgtcacatatacccctacctcagggcctttgcaccagctgttccttctttctctagacatcctcacagcttcctcaagtcttggctccaatgccatcgcctcgataaagctctatctaatacagcaactgcctccccagccctttctctgctgttctcttcccattacccttataatcttctaaagtactatgcaacttacctactatttttgtttcttatcatacatctctccccatgagcatgtaagctcccagagggcagggacttttgtctgcttcctgtgtcttgaagagtgccttggccaccatgtatactccttcagtgtttgctaaacaaatgcacagccccatgaggcaaggactgttttgcccattttatggaggaggaaaactgagactcataatcaggtatgcagcagcaaactgtctgaattcacagcccaaactcaacacagcgatcgttccttattattattcacacagcaaagatggaccaggcagtgttctaagggctggggatgcaacagaagacaaaatagataaagctgagccctcatggaggtgatgctgtatctggttcagttgtttcctgcccaaactctcatccactctcacttttggctctgacagtggcctctgagtaacacagtgtgacatgccttcaactatgatctgaatgttctatagaagccgcctttccattatgcaactgtggtggcttttcttttgttatacgacgattatttgtcaaccccactatctttgcactcaaccatgggccccctgggctcagagacctcgtgacagtcatcttctcatcaccacatctgcaaatgtgtgggtggatggggcagcaacagtccacctcctccaagaagcagtccctgatttttcctccccagacaaatcttcgtctctctgttcttggaaactcaaagaactaagcacctccctcgagctgctgtgcaaatgtgtgtgttgtgttttatttggttcttccgtattttcactctggaagtcgacagttctggccagaatgccacccgcccccacaaaataaacatgtcattgtgataaatgttatgaaagaaatggggtgaagtctaattcagacttggggtgagttgctgggtcaggaaaagctctaaggatgttccttttaagaggaaacctaaaggttttattattgttgttgttgctgtcatttttacagacagggtctcactctatcgcccagcctggagtgcaggacgcgatcactcactgcggtcttgaactcctgggctcaggcactcttcccacctcagcctcctaagtagctggaactacaggcatgcattgccacgtccagccaattttttatttttttgtagagacgggtcttgctatgttacccaggctggttttgaactcctggcctccagcgatcctcctacctcggcttcccaaagtgctggggttacaagcgtgagctaccacacctggcctaaaggatttataagggttcaccaagtgaagaattgggcaaaggtataagtatttcacagcagctttgttcataatggcccaaacgagaatcaacagaaatgccaatcaacaggtaaatggataaacaaactgtggttatttccagatgaatgctattgagcaacagaatgacagaagccacagtgctcactcatccaacacatatttatcaactgcttactgcatgccacctgctgatctaggctgttctagtccacattggtgggtaaaaccaaaagatcaggtgtggtggctcacagtaatcccagcactttggaaggctgaggtgggtggatcacctgaggtcaggagtttgagatcagcctggccaacatggtgaaaccccatctgtactaaaaatacaaaaattagccaggcatggtggtgggtgcctgtaatcccagctactcaggaggctgaggcaggagactcacttgaatccgggaggtggaggttgcagtgagcccagatcgtgccaccacactccagcctgggtaacaagagcaaaacctcatcttcaacaaaacagaacaaaaaacgaataaaatcaccttcccttgtggagatcatagtgatgtagggtgacagatagcagacagatgagtaagtaagaaggtgaaaagttccaaaggggaaaataaggcagaagggcgggaggcaaatgctgagaaggtggcctttgagtgaagtcctgaaggagaggagggagaagccatgaggtcacctgagagaagaacaatgcagacagaggaaacagccagtgcaaaggccctgaggtaggactgtgcctggtgtgtctgaggaagagtaaagacaatggcaggagctgggtgagtgaggccagagatgctcgtgggcttttccaagtgatcttctcgggctttctcccaaggcagagaaaatcagcaatgggaaaggaaaatggcaacttctggagcttgggaagaaaagaggaaagaggaaagaaaaaacgaagagagggaagaggaggaggacaggcctgagctcagagtcctgccaccttcactcttcatgtcttatcagacaaacaagcctggagtcaggagagcccatgtcccagtggcctgccatgctgtcctaaaagacagaccaacagagagaaagaaaggctggcctttaagaaaggaagggcaaagaagaacataaacaaagcaacagaaaaagtaaagctaatatataataacatatactataccagccgttgacaaactctggcccatggcttgtttgtgtaaacaaagttttattggcaaatggccatgcccattcatttacgtattgcctgtagctgcctttgctataatggcagagtagagtggtcccaaagagacagtatttactagacattttctagctaatcctttgcagaaaacattttctgatccccgtactataacaataacatacaactatattagcatattacgtatttgtagcatatatagttgacccctgaacaactcaggtttgaattttatgggtccacttatgtagatttgtttccaataacagttacaccaagcgtgcttgtctttctggcctccccttccacctccacctctgccacccctgagacaacaagaccaactcctcctcttcttcagcctacttaatgtgaagacaatgaggatgaagacctttataatgatccctttccaattaatgaatagtaaatatattttctcttccttatgattttcttaaaataatactttctcctccctagcttactttattgtaagaatacagtatataatgcatataacatataaaatctgtcttcatcgactgtttatgttactggtaaggcttctggtcaagaatagactgttagtagttaagctttgggggagtcagaagttatacacaggctgggtgcgggggctcacacctgtaatcctagcactttgagaggctgaggcaggaggatcacttgagcccaggagttcgagatcaacctgagcaacaaaagcgagaccttgtctctaattttaaaatttctaaaaaatagagaaaaaaagttacacacacatttttgactgcacaggaggtcattgccccaacccctatgttgttcaagagtcaactatatttatctatgaatatataattacataacataaaatggtttattactattataaataacatgctgagttcttaccatgtgctgggcactgggctaagcttttctgcctatgctcttgtattgaatctgatcaaaaactcatcagattaggacaatattattattgttgttattattcattgagaccgtggactccgaatctagatagcctaggctgaaatcccacttttgttgcttgaggggtgcaagacctcagatagtgagtctctctctctgtttcggttttctctttttgttacacgggatgataacagtacccacccctcagggcactgaaaggatgagctaaattgatgcaagcgaggtgcctggcatattgaccagaactctcattaccatggctgtccttattttacagatgaggaaactgaggcacgggaaggtgaagtcatgggcagccaccactgccagaagtggagagctggcaaagttggggagagggtgataaaaactaggaatcacggctctcatgataggtggacctagaagacagcactggggaacttggtcctgtctacctctcacctcattgtcctagacctgggagtgggcagaaggcagggacctgctggtcagctgccagaggcaatgaggggttgctcttccgttctccatggaggggaagaaggccggttaagcttgaatggtggaagctaagacagtgacagccctatcatcacagatccttggaggagttcaaagaagtgggtggggcggggaggggacagaccattgttacagccgctgggctgaccctgggggctggagatgaggatgcacggccagtacagctggaccagattggagtcaggcgggctcacaccattgttaacatgcccagcttcaacgtcacttgtatacctacttctggttgccaagataggctacaaagaggtaggagcaggtgaggggcaggttgcttcctgcccctgggacccaagtccacctccctggacccagcctgagggaccgtttctaggtttcacctccaggaaagtgactgcttggttcaggcagcgatcacttgctttctgttctgactccatcaaggcatctttccccacccagcctcaggttaaggtgaggggcttgccaggggcacagactgcctgcagagacccccactatctcagttctacctcatctcctggagaagacagctatccaagcagaggaccccacactcaagcttggcatagaatttatctcccttggagaacacggaaagattttcacttaaagggaaagaatttgcagaacaaggaaagaagtaagggagaaaaaaagaagagagcagatactggcatgtagagggaactaagaaccaataaccatcaccaccactgctaccaccaataataagaatagcagtaaggaggccgggtgcggtggctcacgtctgtaatcccagcattttgggaggctgaggcgggcggatcacgaggtcaggagatcgagaccatcctggctagcagtgaaaccccgtctctactaaaatacaaaaaaactagccgggcgtggtggtgggtgcctgtagtcccagctactcgggaggctgaggcaggagaatggcgtgaacccaggaggcagagcttccagtgagccgagatcgtgccactgcactcccgcttgggtgacagagtgagactccgtctcaaaaaaaaaaaaagaatagcagcaaggcaaaccttctttttcttttttccacctgagaacctagtttcactttgtgaaaaagacaaagtgacgtgtccactaaaccttcttctccatggactgaatttctcagttccccctgcagtcagatggaccatgggtattggctgtcttccattaccccaaatccactctccttccttctttacccttctaggactgtcacatggggggctgacctgtgtggatgggctcactgggctcccagccctctggctttggacaatgggggacatttattctgccagcttcctgttaggaaatgctccctctctctctttctctccccccttctttctctcaacttgtgtgtgtgtgtgtgtgtgtgtgtgtgtgtgtgtgtgtgtgtgtgtctttgtgagtctcagtctctctctgtctctgcctccttcctctcttcctccttctctatttcagtaagggcccacacctttgtaagctatctcttaatttgattcttaagctatctcttaatttgattcttggtctgtgtcttccgtttcctactgggaccctctctcatacaccatgggatgaaattccagtccacagaatgcaggcagaagtaaggttcactacttctatatgtggcctcccaaaacttcctgtgtgagccttcatactcttttcctacaggccggaagtgaaggactttctgatcttaggggatggtggagccacagatggaaagagccgggtcctgaaatcaccacatggaatgccacttgctgattatctgattggatttagggtgagtgagaagtacattcgtattgccttaagctactgcagacttgggggttgcttgttacagcagcaagcatatcctaatacacctttaagaagactgctcttccccacttggagaagttggctccaccccaactccataaagtcatgtgacccaagcctaagccaatcagagcaccccgttctccacctcccatttccccacagtgattggttctggcatgagcacacgacctcagcaacagccaatcaaaagcaagaaagcatttgctgaaaattccgggaagatagctgaaaaagagagaagaatctctctctgaatatggtcttgggcagactggagggctggaagtgcagctaagtcatggataatggagccagctgcaaaaagtagagccaagaaacagaaacagaggcctaatggtgttatctgatccctagatccaaacaagcctgaagctggacactcctgagactcttcagtctcatgagccaatacaatccccacttcttgtttaagcccctttgagttttccacctcttccaagtaaagggaactaagggattcacataggtaaatataatgagtccacaccatgtgtcaggcccactgacctcacagcaagtcaacaggtagatatttttactttaattcccattttataggcaaggaaatggggaccttttaaattggccaggagcacctcagtagggaaattatttgcaaaagagtatgtttggggattgggtgtgtgagcttgagtaattgggattgggctgaaagtccagaaaccaatcctgaaaccaacatcttttgtatgatttcaagagtgccaattaacttcccccgttctataaaaaatggagataaaaacccttccacttctcccccaccaattccatagtgtcggtttgggtaacaaagtaaggtaacagttaaaaggtgctctgaaggaaaggctagcaactcatccttgctgttgttaataaacagtcattgttgaattggctccagaaaccctgggggccaggggctgtccagtgactctcttggccagaattccaaagaccatctgtggcaaatacatcctccagagcacatacccttggcaggatcacaaactgcttttctcacccagaaaacacaaccagaaaagaaacagagatagagagaggggagagaggggaaaaatcatgccagctcaaaatttcttttaatctgatcaatgatttccatctccacagccaccatgccagcccaaggcacacttccctgaatgagtgaaatcatttcctaattggtctcatggctttttattcttgctgtattccaatacattctccatgcagcaaccagtggaactattcacagacataaaatcattgtattactgcttcagtagcctgacagtgcctttaggataaatatcaaactcctaagcaccttccacaggacctttgcacatgctgttccctgtggccaaaacatcttttccaccattcccacccctacaatagcagaggcccactaaagactcagtttatcagcacttccctggaagatgttgtttcacatgtttcttttagagcaagccagacttgtccctttttgcaaggcctataacattttaaattataagtagtaataactatttacatgtcatccttgccagactgtaaactccatgaaagccatgattgcatctgtcatatccgtcactgtaactcagtgcctggcacacagttggcactcaataaatatttgtggcttcaaaggttgagtataaaaacagaccagatgaaagaaggtaaaagttaaacagtcaagaggttgtcttgcagatcattggggcaagaatgggctttttaataaatgatgctgggacaattcttatggaataaaaaggaaattggacccctacctaccaccacatataaaaatcaatcccaagctgattaaagacatacagtgaacacaactgtaaaactttcagaaataacataaaatatatccatggcctcagggtagaaatgattttcttaaataagatacaaagcccacaaactataaaggaaaagatttctaaaatcaaccacatcaaaattaagaactgttggtgatcaaaagacattataaaaaagatcaaaagccaagccaagagaaaatattgcacaacatataatgatgaagaatcagtttccaggctatgtaaggatcacccacaaatcaatattttttttttaaaagtgacctaatcaaaaatggacagagcatgtagaggcacttcacaaaaaagcaagcttgaatagtcaataaatattttaaactatgttcactctaatttgcaatcgggggatgcaaactaaaatcacaatgagaaatcaccatgagaaaggctataacttaaaaacctgacaataccaagtgttggcaaggttgtgaagcatcttgaatgctcacccaccaccggcaggagtgtaaattagcacaagcactttggaaaattgtttggcagtgtttagtcaaggtgaaaatgtacaaatcttagtatccaacaatttcacacagagcgatgtgctccagagagacccctgcaagcgagcagcagaatccataaacaaccaacaaagctgcttatgccagtgcccaaaagagaacaaagtcacatgctcatcatcaatgaataaacaagatcatgaaggagctgcagtgaccacaatgaggatgaaatctcacaaaggtaactgcaaaccaatgaagcaaaatacaaaacaactcctctcacatgattttattcatataaaactcaaaaccacataatatctgactatattgcttcaggatgcgtacttaggtggtacaaccacacaagaaagcaagcgaatggttcccatacaatctccaatagtggttcctccaggagggaaggagtggctgtgattgaggatgagcatgagggagaatctgatggtggccctgtggctcttgacctgggtaaaatgggtgtacgcttcatggtttggtctttaaaatgttcatctatgttcctacactgctctctaggtttgttctgtctctctctctctctctctgtctgtctgtctctctctctctcacacacacacatacacacacacgtcagttaaagactaaaaaagaaagaagacacatacaccaaccaacagtttatgctgagaaagagaaaaggggaaaatacccagacagaaaattaaaagataacatagacacaggaaatgaaaagagatgacgagttggcaagacggcgagggtaaggaaatgagaactggagagacagaaaaaagaaaaaaataataagatggtcaaggataacaggagaaggggaagatacaagaagcaatattctctctcttctttctgtctctctttctctacctccatatctctccctctccttcatcccttccatctttgtctctctctcttttccctcaccattgccttccttgcacttcctccatccaggtccttctctccccttccatctctgtctctttctcaccttccacttttctttctctctcatctctctctctctctctgtgtctcctctttgtctcctctgtctcttccttcttccctacacacgcagcctctctttcttttaacacttatttatcaggtggctaccctgtgctggacacagtgctaaaaaagaggccctggctgggggaaatgggatggcatggcccaccgtggttcccaagcatcagtggcacggacgcctgcccagggcgcctcatcccagctccagcatggacctgtgggccgcctgccactctctccccatcattaatttcactatcaaacactcccagcatcacaagttgtaggtcttatttattaaatatttaactaggagaaacccagctgagatgaaacctctcatttgtggcagccacaggagagcagaacatggacctgctgctgggattaagccaggctgatgagtagaaccagggtgcccagagggggaaacaggtgggggcagcccccagtggggagaggaagacccagaaatgcagggagctgggctttcacacagtctcacctggatggcgagaggttgtcagccagggaaggcgagttcaaaaacccccaaaatcagaataggtcaatctatacagacagaagattagtagttgccaggggctgggggagcggggagagacagggagtgagcgctcagtgagtacggggtctcctttttggggtctttgaactacagagaggtgatggttgcacaacactgagtgtattaaatgccaccaaactgtacactttaaaatggttaatggtcaattttatgttatgggaattttatctcaatgttttaaaaattaaaaaaaaaaaaatcccacacccaaacccattaaccattagctctaaggctgctgacctcattttttaaaattcatgcttattacacaggcactgcttactatcaatccaaggcactcgctcagcattttgggtttctttcttttttagaaatagggtctcactcttgtcccccaggctggagtgcagtggcaccatcattgttcactgcagccttgaactcctgggctcaagggatccccccacctcggcctcccaagcagctaggactacaggcatgcaccactacacctgggtaatgtttaaatgttgcccaggctggtctcaaactcctggcttcaagcaatcctcccatttcagcgtcccaaagtgctaggattataggtgtgagccactgcatctgaccctactcagcactttgaatcatcccatcatttacttctcacagccctgggagggaggtgccagcaggtctctagttttagagagaagggagcttgtggttcagagagggtaagtggcttgcccaaggtcacacagctccaacttcagtctacctgcttagccacctaatgggctttctgctaactctggctgaactttagaaacccttggggagttttcaaacattccccactccaggggaagccctggacaaatctctccagcatctgtgggggtggagcttggggcatcagcattttcctttttcttttcttttttttttttttttttttttttttgagacagagtcccactctgtcacccaggctggagtgcagcagtgccatctcagcttactgcaacctccacctcccaggttcaagcagttctcctgcctcagcctcccaagtagctgggactacaggtgtgtgccaccacacctgggtaatttttgtaatttttagtagagatggagtttcaccatgttggccaggctggtctcaaacttctgacctcaggtgatccacccgccttggcctcttaaagtgctgggattacacacgtgagccaccgtgcccagcctcagcatttttaaagcttccaagtgattagaaggtgcagtcaagatcacctgaggaatctcactgaagagcagattgggattgagcaggtctggggtaggggatgagattctgcatttccaacaagctcccaggagatgctaattctgttggttcagggaccctggcaacatgtccagtaggatgctctagatctgcactattcagcacagtggtcactaagccacacagggtcatcgggcacttcaaatgtggccagtgaaactcagggactgtttttattgtaattaatttcttttcttttcttttttttttttttttttttttttttgagacggagtctctctctgttgcccaggctggagtgcagtggtgcaatctcagctcactgcagcctctgcctcctgggttcaagcaattctcctgcctcagtctcccgagtagctgggactgcgggtgtgcaccaccatgcccagctaatttttgtatttttagtagagatggggtttcaccatgttggccaggatgatctcgatctcctgacctcatgatctgcccgcctcggcctcccaaagtgttgggattacaggtgtgagccaccacatgtggcctgtaattaatttctaaaattgcaatagccatgtgtggctactgcctaccttatttggcagcataggtctcccgggctcaagagatcctcctacctcagcctcccaagtagctgggactacaggcatgtgccaacaccctcggccaatttttgtatttttttgtagagacggggtttcaccatgttgcccagcctgctctcaaactcctgggttcagcctctcaaagtgctgggattacaggcacaagccattgagcccagcctggtctgcatctgtaagtgatccaagactatggccaagggtgagacaaacaccttaggggagcaatgaagaaattaggaactcacttgggtcctccacctttcctttctcagcactggccacctgttcaggggccttcacctgtccccttgggtctccccaacgaatccctgcttcactccccagagagaaccatcagagcctccccacaccagcccctgacttctcctactcctcagatcaccctaaatcaagcccacatctccccttgggtttcctcctatctcagtttctcagttgtatctcctgtcacctccaaatgcagctaagatcacctgggagatctttatttttgagccttagtacttaccacactcaaactatcctttacctgtttatctggtccttggactccctctctctccccacccagaatatcagccacaccagggcggggatttttgtccgtgtgtttatttctctctgtgttttgtccatctacgtcccagtgcccatgccaaggaggaaattaagagcttgctggtcattagagaaaagtaaatgaccagcaatgactacctgctgagaatttactatgtgccacgcatgatgttttacagtcaccatccacttaatccttgcaacattcctgcaagaaaatgctacactgcttatcttatagatgacgaaacagagtggttaagattaggtagcttcccaaaagccacaccaccgatagaaacctagtcctagcccaggcgtggtagctcacgcctgtaatgccagcactttgggaggctgaggcaggaggatcacgaggtcaagaggtcgagaccagcttggccaacatggtgaaactccatctctactaaaaatgcaaaaattagctgggtgtggtggcgcgtgcctgtagtcccagccacttgggaggccaaggcaggaaaattgcttgaaccgggaggcagaggttgcagtgagctgagattgtgccattgcactccagcctgggcaacagagcgagactccatctcaaaaaacaaaagaaaagaaaggaaaagaaaagaaaagaaggaaggaaggaaggagaaagaaggaaagaaagagagagagagagaaagaaaggaaagaaagaaagaaagaaagaaagaaagaaagaaagaaagagaaaagaaagaaagaaaagaaggaagaagagaggaaggaaggaaaggaaagaaaggaaagagaaaggaaaaaggaaggaaggaaagaaaggaaggaagaagggagggagggaaggagggaaagagaaaggaaaggaaggaaaggaggaaggaaggaaaggagtaaggaaggaagaaggaagggagggagggagggaaagagaaaggaaaggaaggaaaggaagaaggaagggagggagagaaagacaaaggaaaggaagaaggaaggaagaaaggaaggaaggaaggaaaggaagaaacctagtcctagttgagctcagactctgtcccttaaccatcgtcccgcgacatctcttgcccactcgcacaccaacctctctggaatgcaaatggtttcccggagaaaacttgagtatttttccctctgggtttttatccttgctgtgccttcacctgtctcataaagtttctccatttgctagatgtgtgaccttggcaagcagtgttagctctctgagtctcagtgtgcacatctgcaaactgggggcaaaaataagtgccatgagctctgggggctgggatgaagttctcataaactgccagggcagttctataaagcttaggggctcataagctccccacagagaggagctactgttactgtaactattcaccacaaagcagagagtttccatgtcctcctgggacatggtgcttcctctttatcagggatggagtgaaatcctgacatgagcaagggcaggagccaagaaaagggcctttccgtcatgaatgtggaaaatggtctgtttgcttttcatcaggttttgggggttggggacatgggggatcctgtttggtcagttagaggagttgcagctggtcctaaagcttggagagcttgcactaaatcttgtggctgccatttcgctttgaaataaaggggctgtctaagggccaggtgtggtggtgcacaccgatagtcccaactactcaggaggctaagctgggaggattgcttgagcccaggcggttgaggctgcagtgagccatgattgcaccactgtgctccagcctaggggacagagtgagacctcacctctaaattttaaaaagggcttgtcagcaccaacagaggtacacagaggcgcacacacactattgcactggggagggaggaggccgatacctataacactaatacatcagactcttatttggcacccactgtgtgtcaggtactgttttgagtgctgctttcctcacaaccaccccacaatgcaggcactaatgttataccacttttactgatgaggaaaggcaggcccagggggctaagtgatttgcctaaaatgatatgaatggaaataagcagagttggtatttgaacctaggcagccaggctccacagcctccctccctccactacactggactgcctcaagccccacacagagccatgacatgcctcaatttcaacagaaacttgctcaatccctcaaagacatcggtaaagaatgtgcctgagaaaacagaggaaaggatatccaaacagcccacagagatctggaaaatgctctatgtcttaagtcaccaaagaaatgcacaggataccacaacaggatttcactttcacttatctgattggtgaagatgtaaaatcaagggagggcaagcctgattgggccacgtcgtcagggaaaggggaccttggaatttgaaagggcacagacttcctgtttcttgcaacctggcccaaaagcctgacatacaaccttgccataccatttccaggaatctgtcctagggaaacagtgacagaagtgtgcaaagacttctctaccaggatgctcactgcagtgtgatcagtgttggtggaaaaacggctggtctcaaaacaaatatacaaaaggaagcccatttttgttatgaaaatcaaaaagtttaggtatatcggggggaaaaaaggagtggttattccatttcctttggaaaaaaacaaaatcctcaccatagttcacaaagcccagaataagccaaccttgtcacctccctgccctcacgtcctcccattcacctagcatacagtaggtgctcagtcaacatttatgaatgaatgaacgcactccttcccattcccctccatctctaagctgatatgctccagggtctctctcctgtacgttcctaagggtgtggggatcaaggggatatagaaacacagtccataccagcagcattcaccatgccaggagaccaaagaaagtaaggcacgattttcaaacagggcaacagaaggggaaggagagagaaggggaggccgccgcagttttcattccaacattttccagctctgggtgagatttccttctatacactcatctatatttacatcaacgaatctgtcggtagcaagcctgttgcttcttgtgtgggatctaaagttcacagaaagctggcttagacacccagctaggaagacaaactgtaaattaaatttaagtcacccaaaaaccctaaatccacccactcctcttgaagaaacccatgacatcgattacatcaagatttctcaaccttggtattactgacatttggagctggataattctttactgagaaaggctgtcctgtgcattttaagatgctgaactgcatccctggtttctaccagccagatgccagtagcatcttgccccctccccctacattcgtgacaaccaaaaacgtctccagacattgccaaaagtccccttgggggaaaaattgctcccagttcaaaagcactgctttacatgcagcccaggaaaaattccaaaccatttaactgttctttctctgttccttgtcatcaacatcctgaatataccagtcacctgttctcaaaattccttctacagattcaaagaaagtggtaacagcagagtttcaattatgggcttggagtgccatatatagacaggaatttcattcagaaaactatcagaaccttggacagagattcacacacaaagatgtttactgcactgttatttataatggcaaaacaaacagccagagattgttacatgaatataatacacgtataaagtggaacattatcagatattaacaacagtcttttctggggttgccaccaacccatacagcaccactgtatgaatttaaacaagacacccctttctctggttgtgaaattaaacaagacacccatttctctgattgtgaacttaaacaaaacacccctttctctgtcaaaaattgtcataatagcttcatcttgctagaacaagatacttaagcttttatcagctggggtactgaaatagtagacatacaagctccatgatacttaagatatgtgacatgctatctttgtgcagtgcacaacctgtgcaactatacatggtggcccttattttttcaaggatacctagtggcatggaaatgtgttcctaaaagtttacatgcataaaaaggtatgggatgaaatacattaaaatgtcttcagagatttttttgtggatgagagagtatacatatattttatattcttttttgtacatgagatgttcagtaaatgaaaaggataggcctcttggaggaggtaacttttgggctgagacctaaatgaagagaaggagttagccatggggagacctggagaaacagtgatgcaggcagaggaaatagcttatgctgaacagaaggaatgtcatgtaatgcaaatgacatgggtgtgagtaaaatggtcagcagggctgagacagaatagacaatgaaaggaaggtagacaatgaaagagatgagatcaaagacaaaacagggaccagatcacatggggccttaaaggaccttgctacatcagtgtgttagtccgttttcacactgctataaaagtaatttataaagaaaagaggttcaattgactcacagttctgcatggctggggacgcctcaggaaacttacaaatcatggcagaaggcaaagggaaagcaaggcacgtcttacatggcagcaggagaggagagagaggaaagaggcccacacaagtttaaaaccatcagatctcatgagaactcactatcacaagaacagcatgggggaaatcacccccatgatccagtcaccttcaccaggtccctcccatgacatgtgggtattacaatttgagatgagatttgggtggggacacagagaaaaaccatatcaatcagtaatctgtaatctctgactagtgggtaagaatctggggcatttacccaatctgcttggaagagaaagagtctaccagtccaccaccacatgctatcctatccaccaatggagcaaaatccaaggaattccactttcagtcccagtgctgaaacaaaaccaggtgtttccagaattttaataatctttgttcaataacactgtttactttcctcaccattactcaattaaatacttatgcatgatatagtgcaggaactttggggggatgtgaggaaggcaaatcactgtcccctaccctcaaggagctttctaattacataggtaaaacctaagcatataatatttatttatttatttattttgagatggagtctcgttctgtcgcccaagctggagtgcagtggcatgatcttggctcactgcaagctccacctcccgggttcatgccattctcctgcctcagcctcccaggtagctgggactacaggtgcccgccaccacgcctggctaattttttgtatttttagtagagatggggcttcaccctgttagccaggatggtctctatctcctgaccttgtgatctgcctgcctcggcctcccaaagtcctaaacatacaatcttattgatttttacaaaagtgtgcaaaattcacttgatactggaaaaggtacaaataaggtggtaagcggagagacttggtcattcccaagtcaaacagaacaccaaatatcagggagacccacacatagacagctaccctaccatacacccttatatccaacatccacccatccacccacccattcaaccatctatcatccactcatccacccatccagtcatccatatttttacccctcaatccagtctagtcatctgcctatttattcatccagccatatattcactcatacaccaatccatccagtcatccatccagtcatccattcacccatccatttgtccacccacccatcgagtcatctaccaatctacttatccacccacctaccctccaatcacccatccttccttccttccttcatcccatccatccatccatccactcatccatgcatctgttcaaccatccatccatccatccatccatccatccatccatccatccatccacccagacatccaacactaactgcagaggatgcctccatcccctctaaaccacaaacatccagctatgatccataacttaaaagactgcgttgtgatcagaaacaggccacaagtcaaaaatttgcattctgacaactctttcaaagacaactcaagtctctaaacatttctgaccattccaatttgtgtaagacccaaacactccatgtccttgtaaggccctcagagaagctaacctatatttggtgctctgaagtatttgatgtcttcaaagacggtgcccttagggagaaggtaagactagagacagtatagttagaggaaggggaagctgtggggagattggagagtctggcaatggggcataacaaatgagagaaaaagattagaaacatggaagaaggattgctgagacgtggggaaaatcctacttgggcctaggaatcatggaattctagtatggacaatcaatgagaccttgtgattgtgttctccttggcttatatattggagcaacagtgattcagctgatcattcagaagaatgggttaacaacacagacgccaaaaataacagagatcaagggagttgagagacttggcaagaaagagcagaatattaacacttatgcagcacctactgtgtgccacacactattctcagcagtggatcagagaagcccaaatatggccacccacataagtccatccatctatccactcttccatgtataaacacatatagtgcttcctaagtgtcaggcaccactctaaacatcagatgtattaactcatttaatcctcccagataggagctattaggatccccatggagctattagaatcaccactgggacagactgggaaactgaagcacagaacacttaagtgacttgcccaagatcacgcagccagtgactagtagagctgggatttgaaccccagccacctagctccagaatccatgctctcaactcaaccatgctgcttctctacaaccatatcaattgccagtgtctaaaccacaggttctgactctcagaatacaagcaggaccaagagctaaccggttgacccagcctcttagagaaaatgatgagtaagctgtgaaatgtcttagctcctgccataaatgctgatgaatctcagctgattctaggtgaagctagatttccaagtacacagactaaaattaacacctcgaattcattcattcaaaattattgattccttacagcagcattgttcataacagcaaacaaacaaacaatcccccaccccaaactagaaacatcccaaatgcccatcgtcctgcttgaacccgggaggcggaggttgcagtgagccgagatcgcgccattgcactccagcctgggcaacaagaatgaaactccatctcaaaaaaaaaaaaaaaaaaaaaaaaaaaaaaaaaatatatatatatatatatatatatatatatatatatatatatatatatatatatatataaatttatgttgttaaagctgggtacggtggtgcatgcctatagtcccagcttctcgggaggctaaggcaggaggatcgcttgagcctaggaggtcgaggctatagtgagccatgatcatgccactgcactccagcctgggtgacagagtgagactctgactcaaaataaataaaataaaattcattgagttggctacttcacaggatgattatatatgccatgtgctttctgggtacagtatcttttaaccttcttacaattcctcggacataggactactgtccccgttttacagaggagaagactgaggctccacaactgtgagctggagctgagatttgcagccagggtggactgttcccaagctctatatgtctcccctccatccaatatcaccttccctcctcttttcctccttacagcctccactgcttgtgctgttaatcaaacagacacattcctatgcagacgccacaacatgccacgaacacatttcactgcagtgatggtcagcatagccctcccacccacacacaccatgcccatcattctcaataaagaagataataaagatcatggagataaaagaacgtgacagactctggaagatcagaatccatgtaacaccactgcgggccaagttttaagtctgccccagagtctcattgaagacaaatccatccacttttacaaaaaggtaacatccagacttcgccctcctgcaaatgctgttcgtatgaaaatactttaaaaatcagtttaaaattacatatattttttacacataggcctaaaatgagaacagaacttaacagcatgaatattatttactggcaagtgggtgactaagttgggtttccctcatggcttcagagaggggactcttgaatcctgttatttgggggctgggggtgggaggctgctaatttctaactgcaggtgccgcctgagcaacaggcacctttaaggaagactcacggctgctcccagtctgaacggcagataaagccgtgtctgaccgaagcgagatgtcaaaacttgatccggacttaactcaggcatttcccttcatagctggaatctctcttgtattagctgccttaaagacggcttctaaaagctgcattcattccaataaaaagtcttggcttttcagagggaataagtaactgactctccccctttcttggtcaacggcaccatctcttgcaccattcttctctctcaggtgttaagaactcaccattagggtgaccagcgtcccagtttgcccaggactgtgagtttccagagatgctaaacccaggatagtcccaggcaaccctggctgaagggtcaccctactcagataagaactgaggcccagtggtttttgaaacctaagttgctgtgcccactcatggttccctcgccaggaatgttccttgtttttcctatttttttagggagtgaggagaaagaagaccaaagtttggaaggggaggggggtacctaaattctaaaccaaaagttgagcaaagtttttctgtggagtttgcagtggacacctggggtggccatcctgggctgcactctcgaccggccccaaaggaagagacagggagtgcaaaaggggaagagggaagctaattatatactttaaaactccctcaccttgtcacccacagagagagggagggaccaaaggaggaaagagaattaatttttaccttagactcaagggaatagaaaaatgggtcaagtggccacgaattttttttcccctgaaagcttccagagagaacggagaatgcaaaatgtccaaaggtggctttaaagagcgccacgatcaggttaatcaatccacactgaccagtcgcagggggtggtgggggggggcacttcgctcccattcccacccagaaagcctcttttctggccggtttccaaaaaaagaacactggaacctaaatgactccatagtattacggctctggcgttttggggtttttctctgtgctggagactgtgctggccatttttcacgcacgaccccatttaatctcctgagagccctccaagggagatgctactagaaggaatatcctcatcatgcatgtcaagaaataggctctggtgcccaagataacatggctggtgaataatgtgaacctgggccagtctgacccagagtccggagtgttttccctctcctctctgccctctttcagagcaggcaccatcccatccggcccttttctcaggagctgagctggcattctcggaaatgcgttactgcacggctcttaggctctgatcatttctggatggagtccaccttcccggcggtgctttttattgctgagaaagtgtatatgtgtgcttgctactgggggggaaacagggagggggaagcataagccctacgcacccaacagatgcctcccactccaagtccctgaagaaagacttcattctcaaggggccgctgcatccaatctactcaagcactaacatttcagaaactttcattggtctgataatctcatggacagtctctcaaccccctgcaactaaaacccatcaaaatcctaaaacgttggcacaagggtagatcagatagatgttatacaatttagttaatgggtgaagacaggtaccttttctcatttgctcagcaaacgtttataggacgcctgctttgtcccacacactggggttgcagtggtgaagaacagggtaaagatcatgggtctcacagcctcagagcttgactttttcctggggaatggtagaactaccagggaggggtggaaccccacccaagagaaccccttctttctctctctctagtgcaggcacatagctttgaatgacatccttaatctttcttatttctctgaccgggatttaacactattacttccactcctttccatagatccacatccttaatcctaagccatcgaggccagacgtgctttggaattcagaactcagggcttttagacgcattgcaaagatgggaatgtaaaatggtacaaccacttaggaaaacagtttgagagcctcttataaaattaaacatacacctaccacacaactcagcaatctcactcctgggttaatttacccaagagaaatgaaatgtatgaaatgaaatgttcccactaaaacccataagccaatgtttatagcagctctattcataatcattgaaactggaagcatcccaatgtccttcggctgggaagcaaactctggtccatccatatcatggaatcctgctcaacaccaaaaaggaaggcgctactgtcacaggcaacagcatgaatgaatctcaaagtctgagtaaaagaatccacattcaaaaggctatatactgtgaaattacatttatatgaccttcggcaaaaggcaaagctgtagggatggagaacagatcagtggttgaaggggctggagaagtggggtgctgactcaagaggggcactgtgggggtattttagggttgatgaaactgtcccatatcttgatttgggtggtggccacaactacatccatttgtcaaagcttgcagaccagtatgtcaaaagggtgaattttgctacaaataaattatacatcaataaatctattttttttttgagacagagtctcaaaaaaaagtacagtggtgcaatctcggctcactgcaacctctgcctcccaggttcaaatgattctcctgccagcctcccgagtagctgggattatagacgcacaataccacgcctggctaatttttgtatttttagtagagacggggtttcaccatgttggccaggctggtctcgaactcctgacctcatgatccaccggcctcagcctcccaaagtgctgggattataggcgtgaaccaccagacccggcccctataaacctgatttttaaggaaaagaaaaatgataacaagatgtctctatgatctaacctggatactccaaccctagcccatgaacttaccacatggggaatccctagaagctagctagaaaagcagaatcccagaccccacccaaatcctgctggaccagaaccatcctgttaacaagacaacttccatacacctgaaagtttgacaggactacaatgcagacctaacagtcaggagctgaagcagcacctcatcatcaagcacatctaacatttctgctgcaaaacatactcaaatgcacaccaagtagaatgaatgaaaactgtaaattaagacttcaaactgaagtcagttcaggttaggttttacctctatatgagctcgtcttttggtttttggagctttttggattggggaattgtggataagaaattgcaccctttttgaaaatactcccattggaaaagccgtgctaaattttacttcgcagaattttgctcctctggaaataccagccaagccggtctagtacaaggatcacgtaagtgacaccatcctgccctctacggcagtaccttctagaacattctatctctcaggacaggccaagagtctgataacctgctcccatgtctcccagcgcttctcatgcagaaagtttctctttagagagcttttcttaaaaaaaaaaaaaaaaaaaaaaatgagaggagtgccaatcagccaatgtccacagatgtcaaagtgatgtcacctgatgtcaatgtgactttaggtgtcttgttaagatttctgcaaaccggatgaaaagctggaattctacgtgtaattcaggcaactgtgcgtgataatacactgacctgcttccagtgttcctccgatggcctgagtttctacatcatgttcagtgggagacctggtggcacagggagggctggaaagatgacattcaccttggcacttggtagaaggagtgagtggcattaagtggggagggaactctaggaaggctgacagatgctcctttttgagctgacagatctgagctcttcggcaatcatcagagaccctcatggccctatttgaatcacaattccagtcaatgaaaacatgaaaccaaggtgtgtggtcaagacggcttgctgcctggcatgagaaaaacacggcaatgtaaatttgaacatcaaagacttccatttgggtttcctcacttaggaagaggggaaaaaatgaaataaatgaggattcttaattgtcattgatggcttcaagtttgacccactgagggatgaaagaggaagaaatcatagtgacaaattgccccgagtgtggagaaagcaagactgcatccttcaccagtgtaccatgccagaatttacatttggaagtagcactcttaggccctgtgagcataccgacaagttcatggatcattcactcacttctcttaaacaagacagggaggaacctgctttccatatcgacctgcaacccttagtcaacaccatttccaaatacacatcccacaacacatgcatcaaaaagtagcaggggcgattccactcctatctaagagaactgtgggaaaaaaataatagaagacacaagaatgttcccagtggcacaaacagaaatgacacaaatgcccatcaacagtagaatggatagattgtagtagagtcacatacacagatgtgagcaaaagaagccagtggcaaaagaacgtactgtgtgactccatttacatgtttaaaagaggcaaaatgaaccttagaagtcaggtgagcggtacccttgttgggggagcaactaggaggcggtatggggagggggacttccagggcactgatcgggacctgggtgctggatacgtgggtgtgttcattttgtaaaaatctatgcatctgaatatatgtacttgcctgtacatatattagactttatttaagtacctacacactttttttttcactctcaggatatgctgaaacatttttttttaatggcagaaatatttagattaaaaagtagaatgttctgccctggtatcgtgactctgacattccacgtgtctttctctttacactggcctgaattcttttattcactacctccctccccaggtctctgtccatcccctctcatctccaaccctcccacccaccccgccaccgccctccgctccatccaggacagagaaagctcagtcctggatgacccagctcgatgacagattgtgaggtggggagttttcccttccagagtagggctgtataatgtgtttgttacctcgggtcaaagagaacaaaaacagtctgcagagagcataatgcacaaactcatcataagagcaagaaagccccgggcgagctggccagagaatagatgaagtggcaagcaacactcgcaattcacctgcctccctctcccacgattcccccttccgaggggccactgcaatccccctctcccccaacagccctccaatctgcaggattcaggctggacagaggtaagctaaggacacagcagaagggctccccacctccttcctttcctcttagaagtctccaaatccaggctccagaaggcgatctaaagccattttcaatgaggaaacctgtcagccgagcaaagccctctcactcctggagctaactgggtgtgcacccatgaataccctgtcctcctgcaaggcactcccactcctcactctgttgataggcagagtaatcaagccacccctgagcacttcaatgggcctgggatggtgaggaattgctaaccttaagaaccagcctctttaagagtctgaaacttaggaagcaaagacctggcacctgctttgggcaccaacggagatggcatcgtagttagaggtatgctcccctcaaaagcacctctgctgaacttcttaattttccccaccctcaaagtagaccactcacacactccaaaacctcagtgccctctgttgcaatcccagcacccaggatccaagcgccaggctcgattttgaacccccctgaagtgagtccctctaccacccgccatgctcctcaaacagcaacccccggagaccacacagggcccagccccgtttagtctataactgcaaaaccacatacaaaagggataggggactcatcgctgagccccagggacccatccagcccgttcatttttacacagagggcagctggttggaactgtgcggagaagcggcacatctgggcatggcacagtggccagccagcctgggcagcagggtgtgtcccccctcctggaatctgggtcatgcttagataactgctagaaagcccgactaattacccacccttgcctgcctacatctcgatagatgttaagccctcctcaaggtttatttcaagcaggcagggatttaaagaaacacagaagatctgcattttgatagcatctccacagaagaaaatgtgggcttcacctttttcctctggatctttgattaaaaaaaaaaaaatttaaaaggcatttacctacctaagatgtccacatgggtgctgattctcctggtgttccctctcggctactcggggtaggaaaagctggacatggtgctctaaaatggacccaccacctcatttgctgttgccctgtctttcttactgaaagtgtccagatcaggtcttcccaggccaggggcccagataaagcaagtgggatctctttctcgacacccccaaagatgatgaggttccccaatcagcggttaaaggcaatgggacctgcacacatgagggaaacataagcgccccccagcccatcactatcctctccagataggaacagcggcccaccctggggtactcacttcggccagtgctggcttctcagtgtgaaggccacatggactccctcttgctcttagccctgggagcccccaagcgccctgccctaaaagtgcggcggccccccaccttggggaaagcagtagtggagaggctgtccagcttcccctgcgtggactccagtgagcgacggccaagaaaacccaaccaaggcccccatagttcccctgccctggccagaagcgcccaggcccgagcccgctccaagctcactccgtagaactccaaaccctccggacttggctcgaaagcccccaccaaggctcctgcacgaccccaggccccagatctcattctagagtcggtccttgggaaggatccactctccgctgcccaccccccagccccccacaaacccattcccaagcctccagggtagctcaacccagctcggggtggagagattctttcacactcctcccggtgccccctctcccagcccctggaagacccccctcctccccacctcccatcaacccccgggtctctctcccagcctggaagaggggaggcggagggaggagggggaggcgcagctgctgctggggttcgggcaaaaggatatggccattcggtgatctttttggcgtattttctcaccacgttgtcttcgctgaagaggaagagagaccggttaaccgtgaggcagttctgtcggacggggatggggttgtagagtgccatggtccgcgctctctgcgccattgactgcttgtacatcctttgcgccccgggctgcccgccctgccggctgcccccggctcctcgcccgcctccgctgcccacgaccaccccggcggctgccccggagcctcctcccccgtagcgggccggcatctcgtctccgaagcgggccattctgcaaagagcaaagggctccgggttacgctgcggcgaacgatgcggaagacgccgccgccgccgccgccgccgctgatgctgaggctgccggggctgggagcgcggcggctggagctacgactgcggagacgctccacggcccagcccatcgggcggcggcggctcggcgcctcgggtcgggggctcagaaggcggctgcccgggccgagccggggatagcagctcgggacatcttcctggctgaccccggagaaggaggggcgggaggagggtgcgggggcggggcgcgggggcccggggaggaggggggaggggagagagaagcgaggcaaaaaataaccgaggaaggaatccaggcaatccccagtccacccactccggaaaaaaaaaaaaagagacagttaaaaaaaaaaaatccacccaacgcacaccccctttaagacgcgaacggtttgcaaaggacgccccccccgggacgcagtggaagcttcaaattcctccgaggtccgggtcaggctggcatcttgcaaaaggagtgcgctcggcccattaaaaaaaaataaaaaataaaaaataaaaaaatatatatatatttaaaaataaagaaagacgaaacccaggtctgggtggggagggcaaaaaaaaaaaaaaaaaaaattaagtgcccttctgttttgctggagttcctagaccttaaaaatgctgaaagatctgtagctccaaaaataaaataaaataaaaacaaagaagatgaaagggaagggaaagaggagggaaggggagtaagacgctccagagggttcctaaggagtcttcacaccgcagggtccaggtttaaaaaaaaaaaaaaaaattttttttcttcctgaatcaccaacggctgcctcttctgctcccggaggaagtgtgagtgtgtatgtgcgcacagcgtttcgctcaatggtgcctcatcttggggttaaattgcagcagtgaaatcctgaaaattcccaacagggggaaaagagagagagagagaggtatgcgccctccgcttagccactcaatagctgcccctggatgcggcaatgcctctccaccctccaaatccctccacctcctccttctctaggttttgctaaaataagactggtgtggagggttgcgggtagaagaaggtaaagaggaaaaaaaaatgggcgcaaaggtctgaaccactggccagcaaacggaaaaggggagcaattgatgagtttaacagtagaaggacccacccagagtgtcgacacatgagggcccgcgaccaatcgtggaggctcgtggaggcgcgggggtaccgggctcagcggagtttgtgggggagagaggggagcgtcgcatggttgggaggcagggaggggggaattggggtgcttcctcctcccctgggaggaaagcctgttttccaccccgttccatttcggttgcagacagccggacgctccccagcatcttgcaaggagaaggcaggatggaggcaggaaaaaaacttaaaagacagaaaagagaaggggatttgtgtctagaggtgcgattcgtcagtctctaaacaaatttgctctgtttagcaaaagaccatttttgaaagtggagagagtggtttggggttacttctgtgaacgtttcaaatcacaaggactcctgcaagttggaattaaaggtttattctaccttggagaccccagaggtgacaagtctgaactcccaggaggaaataattaaccaggtcctagttggctggataggggttctgggtggtatagtttgcttgatactcacgtctctccagaaccactttgattacttcccattctgctttttgtgtggtgaaattcaataagcacaaagaaaaatgcataaaacataaaggtacggagttaagaaattggtctgaaatgaacactcatgaaatcaagtctagggctagaaatggaacatcaccacctctgcagaaccccctttgccaacacgcttacacagccccttattccagcaataatcgctacctgactttatggtattcatatcttgcttttttaaaaaaagtttgactaccttattatgcgttcctaaccaatacaattttactttgcttcttttgggcttttatataaatggaataatcatatagtatatattctacagtttcttgtttcttcggttcaacattatgtctttaagattcatctggcagggcacggtgtctgcgcctgtaatcccagcactttgggaggcagagcatgaggattgcttgaggccaggggtttgagacaagcctgggcaatatagcaagaccctgtctctccaaaaaccttttttaaaataaaaattaaccaggcatggtgatgtgaacctagtcccagctacttaggaggctgagatgggaagatcccttgagtccaggatgttgcagtgagccaagatcaaaccactgccctccagcctgggcaacaaagtgagactctgtcaaacaaaacaaaacaaaacaaaaacaaacaaacaaaaaaaacaagattcatacatcctaatctgtttcgaattttagaaaaattcacctgtttgttgtcacacatggctgtgattcattcactttcactgctgtatagtatttcatcaagagaatatgccacaatttgtttatccatcatcttgttgatgggtatctgttttttttccagttggggctattaaacattactgcctcaggtacctttggtgcagataagaatgcatgtctctaggaatagccttaggtgtggaatgtctgggtccacaaggtattcatatcttcaagcttataagatgtcatcaaactgtcttgcaaattcaatgtaccaagaaaccattgaattttcatggagcttgtatacgcagaaaggccaaatggagaggaatgggaaaaggatgaaaaaggcaaatattctttcaagccttagctagttaaatcctagttaattcccttcccccctcgccaccccacacacacatatcaatattcgagttcttttggaacactctggaaagatgatatgtctttatataaagtccccgttctgtgccaatgcaccaactattatacattgccccatagcactttcaagattttctaacttgtcacgatatggatgaaatgattaaaccaagagtgattggaattgcaaggagatagaattgtgtgggattcagggagaaggaggggcttttaaggcgctcaccaaatatcagtgatttttgtacttgacattgtttcagatataaaaggtgaacagcaactaatatgaaacaagaagcgagcccatgtgttcagatgggaagaaccagtcatatgagaggagctgagttgaacttatcatttgttctgatggacctctctgagaagattattcagttttagagcaggagcattacctgcatagatctgtgaagaccccagagtttttcaggaaagagtgacatctcactgatggagctcctgccagggtaaatctcccactgagtcttcacagcagccccgtggaacagatgcaaacactgagggtgagggagacttaaaaactttcccaaggtcactaacgtggatctgaacccatttctgactcttgtattctgttggacagaggggaatttggtacaaccactttggaaaaccgttggctgggtgcagtggctcacatctgtaatcctagtattttggtgggcagaggcaggaggactgcttgagcccaggagttcaagagcagcctgggcaacatagtgagaccctgcctctacaaaaggaaggaaggaaggaagggagggagggagggagggagggaggggggagggaaagaaagagagaaagaaaagagaagaaagagagaaagaaaagaaagagaaagaaagaaaagaaaaaagaaaagaaaaggtcaggaaataaataaattagttgagcatggtggtgcatgcctatagtcccagctactggggaggccaaagtgggaggattgtgtgagcccaggagtttgaggctgcaatgagccaagatcatgcactccagtgtgggagacagtcaagtctcaaaaaacaaacaacgacaacaaacacataaaaagaaaaactttttggtcatttctattaacatggccatttgagtatcctatgacccaacaatgtcactcctgggtatacacccaggagaaatgaggatatatgccctagaatgtgcagcactattcatacttgctaaaagttggaaatttccaaaataccgtaatggataaatacactgtagaacatggaattttatgcagcaataagaaaggacaatatggagctacacacaggtgcatggatgaattttacaaactccatgctgaacccaagaagacagacacagaacagaacatggtgtataattcctgttatataaagtttaaaaaaaaatggtgcacacctgtagtcccaggtatcctgattcccagctactctggaggccaagacaggaggatggcttgagcccaggaattcgaggcttgcagtgagctacatgatctgtgctccagcccgggcgacagagtgagacccaatctcttcttttaaaaaattaaataagtaaataataacattaaaaaatgagcaacactgatcacctttagaagtcaaaggagtagtcgctttgagggtaaagggatacattctggaagcatctccatctgggtgacagtggcatgggtgtgctcactttttaagttttgttcattttgtaccttttcactgagctgcacgtgactgatttgtgcagttttgtgtgtgctgcctacttaaataaaaaatatttgtaggctgggcatggtggctcaagactataatcccagcactttgggaggccaaggtgggcagatcacctgaggccaggagttcgagaccagcctggccaacatggtaaaaccctgtctctacttaaaatgcaaaaattagccgggcatgctggtgcatgcctgtaatcccagctactcgggaggctgaggcaagagaatcacttgaatccaggaggcggaggttgcagtgagctgagatcatgccactgcactccaacctgggtgacagagtgagactctgtctcaaaaaaaaaaaaaaaaattcgtgatgctcctgaagtacagcccaagcagcaccacttgtcatgatgatttgtgattgttctctttgcacactttgaccatgaagcccctatacaacaaaatcagacatctttactggaggacaaagaacagtcctccaggatgccccaaaccgtgcctaggcagcagagaagctggctgtgtacagaactgccggcaaagtgttgtgaacattcagattcctgagccatcccacactctcttttatttattcagcatgtccctggggtatagccagttttggcaaccacagctctggaagggggcaaactcaccatctctttcttggcattctctagtgttatcaaaggaggtgctgttggcattttcggtgcaacacttgttgctcttcagggctgtcctgtgcattgcggattgtttagccttcttggcaaatgcccactaaatgtcagtagcatccctagtcatgtgataaccagacatacccacatacatttgcaaacacctcctctcacctgccatcaaggtgacagaagagtctacactttcctctcaccaaatggcatttccaaagtttgcctgactacgaagtttggtgtgctggggttctcctctccttcctaggaatcttctcaagtccttcaacccccaattgctcaatacctcttttccagaaagaacttaactcatttactataaagtgtggcagggctccatgtgcattatcttatagattcactttgcagacataacatttctgtagccaaaggaatgaatctctaacaccagaatcttacctatcacctagcaaatgggaatggatgggcaagaagtcattgcagcctcctcaaatgactgtagtaggtagttcctggacccccactaatacaaattactaatgttgaccaggtagaaagatttagaatgttattagcgttgcagacagaagcagtttaacagcaggcagccagaaaccagccccaaccattggttctaatctttaacacatctgccagctggaggtttaatttatcaatcagcagcagcattactatactggctttaagaatgttattcaattgaacggggctagcatctttgaaataaatgccccaaataaataactgcaaatcgcattcatttgactgctaaaacaattatcagcaaatctagtcatgttgagttgcaaaaatggatcggccaaaagacatttggtctctgccttctggtctggatacccatggggaatgagtatcaagatctttgggaggtggaggataaaaatgacaaagccaaatttgatcatccagacatctacgggtcatgatgtaggcacccaagagtgaattcagagacggaatgtggctgcgactttgggcattacattgcatagcagcatgtgctctgcaagcttccaaaaacgaatgaggcaaagcctaattctggacacagacctggtttcaaatcctagctctcgaaattcctagtagtgtgcatttggaaaggtgcttcccctctctcaacttcagcttcctcaataaaatgaagacaagactccttaccctacaggttgctataaggatgaattaagatcaagcagaggccaggtgtgatggctcatgaccataatcccagcactttgggaggctgaggtgggtgcatcacttgagcctaggagttcgagaccagcctgggcgacatggtgaaaccccatatctactaaaaatacaaaaattatcccggcatggtagcacacgcctgtagtcccagctactcagctactcaggaggctgaggtgggaggatcacctgaacctggaaggttgaggctgcagtgagctgtgatcatgtcactgcattctagcctaggtgatggggtgagaccctgtctcaaaaagaaaacagacaaacaaacaaacaaaaatcaagcagataagccctcagcataatgactagcatacatattatataagaattcatggtaagtagatttttaaaaaatcaccatagtcggccgggtgcggtggctcatgcctgtaatcccagctcttagggaggccgacgtgggcagatcacgaggtcaggagatcgagaccatcctggctaacacagtgaaaccctgtctctactaaaaatacaaaaaattagccgggcgaggtggtgggcgcctgtagtcccagctactcgggaggctgaggcaggagaatggcatgaacccgggagatggagcttgcagcgagccaagatcatgccactgcactccagcctgggcgacagagcgagactccgtctcaaaaaaaaaaaaaaattcaccatagtcaatcttccagacctgaaatttgtgaatatcactgactaagattgattaaatattaccttatttttaacttcttaaataaacattttattttggcataattttagatttacagaaagtttgaaaacgtagtacaagagagttatcattatgcccttcacccagcttcctctaatattgacttttttttttctttgagacaggctctcactctgttgtacaggctggagtgcagtggcacaatcacggctcactgcagcctcgacttcctgggttcaagcgatcctcccactgcagcctcctgagtagctgagtagctgagactacaggcatgtgctaccatgctccgataatttttgtatttttagtaggtatggggtatcaccatattgcccaggctggtctctaacttctgggctcaagcgatgcacccacctcggcctcccaaagtgccgggattatggtcatgaaccatcacacctggcctctgcttgatcttaattcatccctacagcaacctgtagggtaagaagccttgtcttcatccctagtagctgagaccacaggcacaaaacaccataccaaactaatttttttttctttttttttttctttttttgagacggagtcttgctgtctcccaggctggagtgcagtggcgcgatctcggctcactgcaggctccgccccccagggtttatgccattctcctgcctcagcctcccgcgtagctgggattacaggcgcccgccacctcgccgggctaatttttttttgtatttttagtagagacggggtttcaccgtgttagccaggatggtcttgatctcctgacctcgtgatcctcccgcctcggcctcccaaagtgctgggattacaggcgtgagccaccgcgcccagccccaaactaatttttaattttttgtagagacagggtctcactctgttgtccaggctggtctcaaactcctgggctcaagcaatcctcccaccttggcctcccaaagtgttgggattacaggtgggagccactgtgcccagcctcattttgtctccttagtctcctctgatctgtttcttcgtttctcacaaccttaataatgtctaggagtactgatcaagtactttgtagaacgtccctcaccttgggtttgtctgttttcatgattaaactggaataatggatttgagagaagaccattgcacagaggtgcagtgccgttctctttgcatcagatcagggtgtaagatagttacatgacttaccattagtgatgttaacctcgatcccttggttaaggtggtgtctgccaagtttctccaccatcaagctactgtttttcccaatacctactctaccttctgaacagtcactaaggcctacccacatgaagtggaggaagagggataaatatccccttctggactgggaagtatctatccgtattctttagaattctttcataaggaggccgggcacagtagctcatgcctataattccagaactttgggaggctgaagcaggcagatcacttgagctgaggagttcgagaccagcctgagcaacatagtaaaatcccatctctacaaaaaataacaaaaattagcggggcatggtggcactcgcctgtagtcccagctactctggagtctgagataggaggatttcttgagcccaggagttcaaggctgtagtgagctatgatcttgccactgtactccagcctcagtgacagaataagaccgtatttctgaagaaaaaaaaaaagttatatatgtaggcaatttggcaactaccataaaaacatacaagaactatcaggggataatgaaagtttgagggataacagatcatttacatagtgtcagagtatcttcccaaagacaactgttaattttaatggtcaaaacagtaacctgatagtggagcaccctggcagataagcaagtgacgggcaaatcacgtgcctcctagaatgacataccaagaaggctgcaacatcgcttctaggaacttctgccaaaaatgcatgatttgaataattggtaaacaaccatgttcagattaaggggcactttatacaataagtattctttggaagtgttaatgtcgtgaagcccagataaagacagaacaactggtccagagtaaaggaaatgtgactgaccaaattcaacaagtgagccaggacctccttttgctacaaaggacgctattggaacaattggtgacatctgaataagatctgtagattacataataacagtgttcatatgctaatttcctaattttgatcattgtgctgtgcttatgtaagagaatgccctgttttgggaaacacactgaattatatagggttaaagggccatgatatctacaaattactctcagtggtcaacggttggggtaaggagagaaagagagagagagaggataaagtaaagtgtaagtggtaaaatgttaacatttgagaaacctggataagtgatataggcgacttctttgtaccagtcttacaactttttggtaaatctgaaatttcaacaaaataaaaagttaaaataaatgagtggctacaaaaattgcagaggcacaaggttcattcattctcctgactgtatggaacatctgccatgtgcccagtaattttgccagcacagaacaaggcagacagaatttcccgttgtcgtggagttgaatggagatgaggaataaatagagtaaataataaggaaaatacatagtatgtcagatgaggctaagtgctaaggagagaaacaaagcaggaaagggaatagagggtgctgccattgggaattagagtcaaatgcgtctctgaaacaggttttgttatgcaaaatagcagccccctgcctccctccatgtttcatatccccctcctgaaagatactcactatcaacacttttcgctgatttttttttcttttttgagaaggagtcttgctctgtcacccaggctgcagcgcagtggcacaatcttggctcactgcaacctccgcctcccaggttcaagtgattctcctgcctcaggctcccaagtagctaggcttataggcacccaccaccacacccggctagttttttgtatttttggtggagacggggttttgccatgttggccaggctggtctcaaattcctgacctcaagtgatctgccttcctcagcctcccaaagtgctggggttacaggcatgagcccctgaacctggccaccttttggctgattttaaaaatcattatggatatataatagttgtgcctatctatggggtatatgtgacattttgatacaagcatacaacgtgtaatgatcaaattagggtgactgggatatccaccacctcaagcatttaccatttcttggctattattaaaaagtcaaaaaataacagatgctgatgagcttgtggagaaaaaggaatgcttatacactgttgttgggagtgtaaattagttcaaccattgtggaagacagtgtggtgattcctcaaagacctaaaaacaaaaataccattacactcagcaatcccattactgggtatatacccaaaggaatataaattgttctattacaaagacacatgcacgcgtattcattgcagcgctattcacgatagcaaagacatggaatcaacctaaatgcccatcaacggtagactgaataaagaaaacatggtacataaatatcctggaatactatgcaaccataaaagaacaagatcgtgtgttttgcagggacatgaatggagctggaggccatgatccttagcaaactaatgcgggaacagaaaaccaaataccgcatgttctcacttataagtcggagctaaatgatgagaacacatggacacatagaggggaacaacacacactggggcctaattggagggtttagtgtgggaggagggagaggattaaaaatataactaatgggtactaggcttaagacctagtacccagattacaggcgtaatctgttacacctgtaatcacagcactttgggaggccaagaagggcggatcacctgaggtcaggagttcgagaccagcctggccaacatggtgaaaccccatctctactaaaaacacaaaaactagctgggagtggtgacaggtgcctgaaatcccagctactcaggaggccaaggcaggagaatcgcttgaacccgggaggcggagtttgcagtgagccgacacggtgccactgcactccagcctgggcaacagagtgagactctgccgcgaaaactaataataataatctgtacaacaaactccaggacacaaggtaacctatataacaatcttacacatataccccctgaacttaaaagtattttttaagaaaggatttaccatttctttgtgatgggaacataaattattgttacctatagtcaccctattgtgctgccaggcactagattttattcctcctatctaactctatttttgtacccattaatcatttcctctttattccaccctccccactacccttcccagcttttggtaactatcactctactctctacctccatgacttcttttttttttttttttttttaagctcccacatatgaatgacagcatgcgatatttgtgtttctgtgcctggttccctttagctgattattttgctatttactaccatattatttatattgggtttttgtttgtttgtttcagagatggaggtctcactctgttacccaggctggggtgcagtggtgcaatgtcagctcactgcagcctcaaactcctgggctcaagtaatcctcccacctcatcttcctgagtagctaggactactgatgcacacctccacacctggctaattttattatttgtttttgtagaggtagtgtcttgttgtgttgcccaggctggtctcgaactcctagtctcaagcaatcctcctgcctcagcctcccaaagcactgggattacaagtatgagccaccacaccaagccccacatcgttcattcacttacttctttctacttttaaatttttcagttttagtcattatttatttgttccaacactattattttattcaactaatatttctcaaactgaccacatactatgcgtagcatactatgccagccactacagataatatagagaagcattaactatcaaagagcttatagttaggttgggaaaacaagtcgtacacttgtgaatatttaagtagtattaagaaatagccaacagcaatacccaaggatattataatgaaagcaacaaagaagtatcctgtctgggtgttgtagcactttataggtattagctatagaaaaggaggattttgctaatttctccctccatccccctacacatggaactttccaaaacctgcgcatttgcccaatattgttctttcacaaagtgaggaagattcggtgtttatattatcatgtacaaggcaagttacagttatgtcatgaacaaactatagctactttttctttacaacatattgtttcccttgggacttatcattttttaatcttctttgtttggtacttattgcaaatttgaccccccaagtctcttaacaggtattcagttcattttatcatccagaagcagtctttcctgaagacttgtcacatggtctaatcaggactttccctggcatacagctttcatcctgggctctctctttatcatcatccaggagattccctttgcttctcattgttggatttcttaagtccagtgttctctgtttccctcttcttggtttactcccttgtttgggtgaagcacatcctctggtagcttcctaagaaaggatgcatgagaggttttccagttacctattgctgcataaaaaccagcccaaacttagtagcataaaacagcaacattcatttttattatcacattttgtgatttgggtggtcaactgggatcatctgagtggttttcacttggggtctttcatgcaaatacagtcagatggcgagagggactagggtcatctcaaaggcttcctcagtcacagggctggaacttaggctggaaagactcaaacaactgaggtttctcaagcatctatctccatttctatgtggtatctccacatggcatctccagtatggcaacttcaggatagctgaacttctcttatgccagttcaggactccaaaggcacatgtctcaagggagagagccaggcagaagctgcatctccttttatgagctaaccttggaagtcacaaagcatcactccttccctactctattagttgaatcagtcacaaaggttcacccaggttcaaagggagagaatatagattccaatcctttatggggaagtgataaaattctaagcaagtgtaaaatgggagccattgtgcagccatttttgaacagtctaatctgtctcaggaagtaaatattggagacttctatgtatgaaatgctattgttttagctttatacctcattggtagtttggctgggtatagaattctggtttggagatcattttacttcaaaaatgtgaagtattgctccaacgtattctcaattccagtattgctgttgggaagtttgaagcattcttactcctgatttcttgtatatgacctcattttttttctctagtagcttttagaatctttttccattgtgttctaaaattttattatgatgtaagttagtttaggtctattttcagtcattgtactgggcacttagtatgatgattgttaccccctttttttagagacaaggtcttactttgtcacataggctggagtgcagtggtgtgatcatagcttattacagcctcgaactcttgggctcaaaacagtcctcctaccgcaggctcctgaggactataggagtgtgccaccacacccagctaagattctcacccttttttcatgattctcttttaaacttattatttagatgttggactttctggactgattctcttatctgttcctttccttctattttgtatttccattgtgtcttaatcttctttttgagagatttctctaattttatctttccaccttttgttcagttttttatttatgcttttatattttttaatttcaagaggcttttggtattgctataattgttctctgagtgttccttttccatagtattctgccaacagccacaagtttaagcttgaaatcacatcttcccccagtcaagccttaagatgagaacgaagccccagttgataccttgattgcagcctcaagagagaccctgaaactgctgcaccctggttcctgactcacataaactgtgaaataaatgttgcttaaagctgccaaggctttggtaaattgttacacagcaatagataatacattaagtctccatatttcttatcttctcttcctgaaataaaatagccaatttttctcctttctggatctcaaaaagatttattctctgagacaggcattagagctgttcaccaaatatttccagttctccatatacaggcatgtgtaagatgtaagctggcatttcctggcccccttgtggtctgctggggtcatgtgactaattctgaccaatgagttctcagtggaaatgaaacatgtcactcccaggttgaagcatttaataaccaatacaaatctctctaatgttgcagtgtccaaggcagtagccacatgtggctatcaaaattaaacaacatttaaaatcctgttgttcagtggtacaagccatatttctagtcctcaaaagctacatgtatctagtagctactttattaaacattggagatagggaacatttttggaaagttctattgaacttttgaaagtggtccacggcagtgctctacaccacttttttcttctgcataggaactggcaaagctccaggtggcaaacgctccttaagactagctccagagtgaggacaacatgcaacataagtgactctttagctttttcttttattgtggaaaaatatgcatcatagccgggtacagtggctcatgcctgtaatcccaggactttgggaggccaaggtgggtagatcacctgaaatcaggagttcgagaccagcctggccaacatggtgaaatcccgtttctactaaaaatacaaaaacttagctgggagtggtggcgggcacctgtaagcccagctactggggaggctgaggcagaagaatcacttgaaccagggaggtggaggttgcagtgagccgaggttgctccattgcactccagcctgggcaatcaaagcgaaactctgtctcaaaaaatatatatgcataataaaaacttgatcattttaaccatttttaaggtgtacgtttcagtggcattaagtacattcacatagatgtgtaaccgtcaccatgattcgtgtccagaattttttcatcttcccaaactgaaactctgtccccattaaacactaacttcccattccctctcccccagcccctggcaaccactcttctactttctgtccctatgaatttaaccactctagggaccccatataaacagaatcatacagtatttgtcttcctgtgactggctgatttcacttagcattatgtcctcaaggttcattcatgtcgtagcatgtgtcataatttcattccttttttaaggctgaataatattccttcatatggatatacaacacaatgcttatccattcacctgttgacacacacttgtgttgcttccaccttttggttattgtgaataccgctgctatgaaatggatgtacaaaggaacatctgtttgagcccctgctttcatttctttgaggtttacacccagaagtaaaattgctggattatacattaactttatatttgagtttttgaggaatcaccataccattttctgcagcggctgcagagtccttagctttgagaagtacatattaaaatatttgcagatgaaatcatacgatgtctgagatttcctttaacagggttaaacacaacccagggttatgttagagcaaattaaaggtttgcttcaatttgcaaattaaggttatgtttaagtttgggctagagaaatacaagatgtgttatgagttgataattattgaagatgggttataggaattgggtgggatatcattctattttctcttctttcatatgtgtttgaacttttccaaaagaaaataaatttacttttcatataaagtgcttgaagtattcttaattcacattgagacaagggcctcacacttaattatggaaacaaaagtactcaagcttactatattcttaggcaattacaaattatattcagcatctaacccctctggtaagtcaggagcttgattaaatgcttagttatatattcatgtgtatcctaagaagttagcaagggaaatttaatcaaatgagctacacctgcttatggaaatgcagatcttagtttttcttttttcttttttttttttgagacagagtctcactctgtcgcccaggcaggagtgcaacggcacggtctcggctcactgcaacctccacctcctgggttcaagcaattctcctgcctcagcctcctgaatagctgggattacaggcgcccaccaccacgcccggctagtttctgtgtttttagtagaaacagggtttcaccatgttgctcaggctggtcttgaactcctgaccttgtgatcctcccgcctcagcctcccaaagtactgggattacaggcatgagccaccgcgcccggctggtttttcttgagtaagaaccgagcaaggtgtccccaggttgcaaaataacaagttttaccacacctggagataaagttaccaacgataggatcaagtgcactatttcacctagaaagcttgagaaaaattatcagcttcatctgttcattcattcatttgacatatgttgattatgcatttattctataccagatcctatcccaggcacatccattaatagagcaaataatttcctgttcttaggaaactcactgtttagggcagagaaatcagacaaataaactcaggcagatttatcatctgtcaggtaaagatagtttttataagaaaaatggaggccaggtgtggtggttaacgcctgtaatcccagcactttgggaggccacggctggtggatcacttgaggccaggagttagaaatcagcctggccaacatggagaaactctgtctccactaaaaatacaaaaattagctggggatggtggtgcatgcctgtaatcccagctacttgggtggctgaggcatgagaattgcttgaacccaggaggcggaggttgtagtgagccaagatcacaccattgcactccagcctgggtgacagagcaagaccctgttgaaagaagaaaggaaggaaggaaggagagagagggaaggaaggaaggaaggaaggagagagggggaaggaaggaaggaaagggagagaaggaaggaataaaggaaggaaggagagagagggaaggaaggaaggaaagggagagagagaaggaaggaagaaaggaagggagggagggagggaagagagaaagaaagaagaaagaaagaaaaagaaaaaagaaaaagaaagaaagagaaaagaaaagagagaaagaaagaaagaaaaaaagaaaaagaaagaaagaaagaagcaggtaagggtcagagtgggagctattttgcaaaagactgctctaagaaggtgatatttgagcagagacatgaaggcaggaaaagacgtgctgctatctgaaggaagagcatcgcaggcacagggaacagcataggcagaggcctagatggaagatgcctggcatgcttgaagaacattaaggaggcttgtgtggctggagtggagagaataggacatgagggcagggaggtgatggggattatggggctggcattccatgttgggcctttattgttttaaaatgtaggttttattattattgttatctttttgagacaggtttttgctctattgcccaggctggatgccatggcatgatcatgggggagattcactgcagcctcaaccccctgggctcaagcaaacctcacacctcagcctcctgaattgctgggactacaggcgtgtgccaccatgcctggctaatttttccgggtttcttttgtagaaatagggatcttgttatgttgccagggctggtcttgaactcctggtctcaagcaatcttcccacttcagcttcccaaattgctgggattacaggcatgagccgctgcacccagcccagttttattattattcaggtatggcaaggccactagatcaggggatgactgccattgaaaagacagtttgttactcacaggtccaagaagaaggggcacgcccatgctatgcagggccacacagggaagcaccagggctgggccagggaccgagggaataaagaaaacatgtgggcaagagcctttattgtggtttccatgggaaggaatgagccaggcagggtgagggcttcggggcatgggagttgcccctcgttgtttggtacctggctctgagatcattagagcaggggaatagtgtcccagcatgtgagagcccaagaaaggagatggttgggggtgtagatctggattggttggtttgcatgtaaaaggctctttactatctagaaattgtctagctctgggagggggcatccttgtagggtcagcaaagccccacatatcagagaatcagaaatacatggttaagaccgggtacagtggctcatgcctgtaattccagcactttgggaggtggaggggggtgggtggatcactcaaggtcaggagttcgagaccagcctggccaacatggtgaaactctgtctgtacaaaaaatacaaaaattagcctggtgtgatggcgggtgcctgtggtcccagctacttgggaggctgaggcaggagaatctcttgaacctgggaggcagagcttgcagtgagctgagatcatgccactgcactccagcctgggtgagagtgagactacatctcaaaaaacaaacaaacgagcaaaaagacatggttaatacgttgattttatgaaacttgcctcaaagatgtttcctcttgtaaaggcacattggggctcttaaaatgtttcgagttataggacctcaaagctcctgtctgtcttgttcactgcctcagcctcagccatgaagagaggtcaaaatagaaacccaacacctccagaagtgaaaagggcaagttgcagagaagtgcaggtgttgagctatctttatgaaagaaagagacagaaatacatgaaaaaaagaaaaaccattttgctcatattctcaagaagaaacaaaagattagccagaaaccaatacaaattattttccaatggggagagagagagaatgaagctggggacacaggtagggggcatttgattctgatgcctccttagaaggagaatagcatgatttccccagaaaatggagacttggtccttttattttcttctgttttgcccaacgactaaaaaagagcttgtatgtatccggggaagacaacagagaatgtggtaagagagttaggcttggtgacaacaagaatgggagcacacgcacatgtttgcaaggttacacataaatatatgcatacatctgtgatctccttccatagctgttctgccttttccgtcactgaaataacaactaaatcatctcatgtcccatatggcagccagactgtcacaaagttaatggacataaagttcacaagggcttgtggtacaaaaagtaaactttttgaattataaggaagtaggtactacactggtgcagcaaacactgtccagccatgccctgaccacttgagtgcatgcaggtctgacttccccctgccagcccccagggcattttctctggctatcaaagtgtccactcagcagtctgtggtgttagagaattaatactcccatcctttaacttatgatggatgggagttgatggatcaataccccagctccctcaccactagcatgcaacaacgctgaggaatgtgctctctgctgcctcccagaggtccccactggtaattgagacccagttgctcatggtggtaacttgcctgatgactcacttatcactgggtcttccctttcctacttttctgccagtgtgttttgggatctcctccagaagcattcaaatctctgcttctggatctgcttcttgggagttggggggcgggattcaaactaagacaatggagttggacagattctgttagctacttcaaaatatttaggcagaaggaaggaacttcagggcattcagggcagttttcctggatcctccactgaacttccttcctttcattttccttccttccttccttccttccatttcttcctcttgtttcttcctctcattctcctttctttctctctctttccttccttccttccagctcaagacatggggctgcttctgctggggcaatacttaatggtgttacatacaaaggttttttttccatattgggggaaatatttttaggaaggacttccttttttccttccttccttcctcccttccttccttccttcctttctccttccttccttcatcaaaaaagagtatgaaaggtgtcttagtccattagtgttgctataaaggaatacctgaggctgggcaatttataaagaaaagaggtttgtttggtcaacagtcctgcaggctgtacaagaaagttggtacaggcatctgcctctggtgagggcctcaggctgcttccatcatggtagaaggtgaaagggagctggcatgtacagagaccacatgatgacagaggaagcaagagagagcagagagaagtgccagagtcttttgaacaaccagctcttgggggaattaatagagcaagaacttactcattactgagaggaaaataccaagcccttcatgagtgatctgcccccataacccaaacacctcccactagaccccatctccaacattgagaattaaatttcaacatgagatttggaggggtcaaatatccagaccaaaagcaaagggttttgtatgacaaaacaagcatatatcaggtacccccgatatgtttactacctgagccttattgtgtcaccaaaaaataccagaaatactcgtcaaagatttagacccacacacactatccaaaacctagccataagccacatgtggccactgagtgcttgaaatgtgactcatctgaattgagatcagtaaagcataaaatacacaccagatattgaagatttttgtttctgtttgtttgtttgttgagacaggttctcactctgtcgcccaggctggagtgcagtggcgtgatcatggcacactgcagccttgacctcctggatttaggagatcctcctgcctcagcctccctcgtagctgggactacaggtgcataccactatgcccagctaactttttgtagagatggggttttgtcatgttgtccaggctggtctggaactcctgaactcaagcaatctgcctgtcttggcctcccaaagtgctaggattacagacatgagccactgtgcccaacctgaagacttaatgtttttaaaagtctgaaatatctcaatagtttatatgttcatctcatgtggaagtaacattttcaatatattgggttaaaaatatattattaaaactagcttcacctgtttcttattaccatttctaacgaggctacctgaaaatttaacattacatatgtgatccttgtatttcttttgttttcttttctttcttgtttttttttttttagagacagggtctcactttgttgcccaggctggaacacaacggcacaatcatagctcactgcagctttgaattcctggcctcaagaaatcctcccacctcagcctcccaaagacttgggattacagggatgaaccacagcaccctgaccccttgttgtatttctgttggacagtgcttatcggatgactaccaagccctgcacttctttttgtttgtttgtttgagatggagtcttgctctgtcacccaggctggagtgcggcagtatgctctcggctcattgcaaccactgcctcccaggttcaagcaattctcctgcctcagcctcccgagtagctggggttacaggcacctgccaccacacctggctaagttttgtatttttagtagagttggtgtttcaccatgttggccaggctggtcttgaactcctggcctcaagtgatccaccccctaccttggcctaccaaagtgctgggattacagacatgagccaccgtgcttggcttcttttttcttttttctttagagacagggtttcactgttgctcaggctggaacacagtggcacgatcatagctcactgcagccttgaattcctggcctcaagcaatcctcccgtctcagcctcccaaagagctgggattataggcatgagccacagcaccctgatcccttgttgtatttctgttggagagtgcttgcctggatggctaccccagccctgcacttctgagctccatgaccccttagaaatggtttcctcatctagaaacaatgcaacagcaacaaagaataataataccatgctaacatccatgctgggttctacttatgtgagtttgaactatcatttcacctctttgagcctcagtttcctcacctgcaaaatgaggatgaggacaggacacaccccatgggatcacgaaaggatggaacaatgccctccctctatatgtgacaggccaagcacagggtagtggaaaataaacactgacttcattggcaatcctctttactgagtgcagttgaaattgcctcttacaatgcaaatcaaaaccacagtgagataccatctcacgccagccagaatggcaattattaaaaaatcaggaaacaatagatgctggcgaggctgtggagaaatagtaacgcttttacaccgttgatgggagtgtaaattagctcaaccattgtggaagactgtgacgattcctcaaggatctagaaccagaactatcatttgccgcagcaatcccattactggctatatacccaaaggattataaatcattttactataaagacacatgcacacatatgttttttgcagcactatttacaatagcaaagacttggaaccaacccaaatgcccatcaatgatagactagataaataaaatgtggcacatacacaccatggaatactatacagccataaaaaagaatgagatcatgtcctttgcagggccatggatgaaactggaagccatcattctcagcaaactaacacaggaatagaaaacgaaacatcacatgttctcactcataaatgggagctgaataatgagaacacatggacacagggaaggcaacatcacacactggggcctgtcaggcagtggtggggaaggggagggagagcattaggacaaatacctagcgcatgcggggcttaaaacctagatgatgggttgatgggtgcagcaaaccaccatggcacaagtacacctatgtaacaaaccggcacattctgcacatgtatcctggaacttacggtaaaataaaaaataataataatacaattaaaagttaaaaaaaaaaaaagaaattgcttctcgtgtccaggaaagcacctggtgctccagaaacagagaaggcaaaaacagaaaaagacccactggaggccaggcgcggtggctcacgcctgtaatcccaacactttgggaggccaaggcgggtggatcatgaggtcaggagtttgagaccagcctggccaacatagtgaaaccccatctatactaaaaatacaaaaattacagctaggtgtagtggcacgcacctgtagtcccagctactcaagagactgaggcaggagaatcatttgaacccaggaggtgaaggttgcgatgagccgagatcttgccattgcactccagcctggatgacagagtgtgactccgtctcaaaaaaaaaaaaaaaaaaaaaaagacccactggagacacaatcaaataaaggtaatagaaaaagagaccccagcatcacttattggtgggagtaaaaatttcacctaagaattacatgtggagaaaaacatgaacgcatttgtgttcagactgttcaaatgcatgttgtcccacagagagcttaataggttgacttggcagaccattaaatctcgcttctgtgtctcttgccttcccttccttggcgtcgtctgtgtcttttgttgtggaaaaagctttcatcccatgccgacagaaatcactcaactctcacctgaggcactcatttaagagcatgcctcagaggattgtgtgttccttggacacgtgtcaaaatatcacatgccttccataaatatgtacaattattatgtatccatagaaaaaaggaaattaagaggaacaaatatagagattaatactatttgcatattaaatgatgatctaattataaaacataggaagttaaataaaaatattagaaacaatgagataattccataaggtggctagttataaaattaatataaaaattggatcgggcacagtggctcatccttgtaatcccagcgctttgggaggccaaggtgggagaattgcttgagaccaggagttcaagaccagcctagtcaacatagcagagatcctgtttctaaaaaaaaaaaaaattatattacaagggcatagtggtgcacacctgtagtccagctacgcaggaggctgaggcaggaggatgaggctgcagtgagctacgatgatgacactgcattccagcctggccaacagggcaagaccttgtctcaaaaaaaaaaccaaaaaattattataaaaattaatgctgcccgggcacggtggctcatgcctgtaatcccagcactttgggaggccaaggcgggcggatcacctgaggtcaggcattcgagacaggcctgaccaatatggcaaaaccccgtctctactaaaaatacaaaaattagctgggcatggtggtgcatgcctgtaatcccagctacttgggatggtgaggcaggagaacagcttgaacccaagaggtggaggttgcagtgagccgagatcgcaccattgcactccagcctgggtgacagagtgagactctgtctcaaaaataataataataataataactatatatgatgaccacttactgaataaaatggggaaaaaagtctcatttacaaaagcaaaccaagataaagtactgtattgaaaataaacttggccgggcacagtggctcacacctgtagtcccagcactttgggaggccgaggtgggcagatcacctgaggtcaggagttcaggaccagcctggccaacatggtgaaaccccatctctactaaaaatgcaaaaaaaattagccagttgtggttgtgcgtgcctgtaatcctagctactctggaggcagaggctggagaattgcttgaacccaggagatggaggttgcagtgagtcgagattgcgccactggactccagcctgggccacagggcaagactccatctcaaaaataataaaataataataatgctaactatatatgatgaccactcagtgaataaaacggggggaaatctcatttacaaaagcaaaccaggataaagtactgtattgaaaataaacttatggagtgggaagaacccttatgaaaagaattttaaaattctactgaagaatgtggtataatcctccaatacacgaaaataaatgcagttattgagaggaaaacaatactgcataaaaataaattctgtccaagttactctacgagtaaaagtgttatttgttcccaaatcaagaaaaaaccaagtcaccttgggggaccagaatcaggggaaagagatttaactgggcttaaagatgtgttacaaggcggcacggcatatgttggagttgtatgaccttgggcaagctgctcaacctctctggcctcagcgtgctccttagtaaaacagggaaagtgcagtgttcttgtgattggtgattgtgtggattaaagtcatgttagataggctcacagcctgggtggcggtgttggtaattttcactgcctccaacttacagtcacgtattatcaccaaagtgactcccctcctcccacatgagtctgagagggctcctggtatatcaaaaccatgtgaaaagcaatcgtgtcctttggacattttagtgcattagctcccactgaatgtaacaattgtggccagtgtggtggctctcatctgtaaactcagagatctgagaggccaaggcaggaggattgcttgtgcctaggagttcaaaaccagcctgggcaacatagcaagaccccacccaaaaaaatagccaggcatggtggcacatgcctgtggcctcatactttggaggctaaggtgggaggattgcttgagcccaggaggttgaggttgcagtgagttatgatcgtaccactgtacttcagcctgggtgacagagcaagactccatctcaaacaaacaaacaaacaaacagtgagtctgaaagttttctttaaatttccttgtttttatttttttaagagatagggtctcactttgtcacccaggctggagtgcagtggtacgatcatagctcactgcagccttgaattcctgggttcaagcctcagcttcccaaagcactaggactaaagtgtgaaccactgcatccagccataaatcaaatttctttcatttgttttaaaaatttttgcaaaagtaaagtaatttttattttaaaatattttaggctgggcaccgtggctcatgcccataatcccagcactttgggaggctgaggtgggcagatcacctgagtcaggaattcgagactagcctggccaacatagtaaaaccccgtctctactaaaaatacaaaaattagcaggcgtggtggcgcacacctataatcccagctactcgggagactgaggcatgagaatcacttgaactcaagaggtggaggttgcagtgagccgagatcgcgccactccagcctgggcgacagagtgagacagtctcaaaaaaagaaaaagcacaatattttaaagccactctcccatgacttctccaatacaaatactgggtattttattgtatttctgtctggttctccccctctaggtttttatttttcatacacatgtaattataatttaaagattttatatacaatagttttccatcatctgagtagtcactatacggctcattatccaagtatttacaccattatgtgtttagggaagcaaaagtcatcctaacataaaaattgtcactaatgaactgacaacttgacaattatccccctcaaccatccatttcggagtaatacaaatattgctttggaagccatcagatcagtgtgtttgtcactgtttatctctgattgttgatggttgcttgaaactcaatgacacaattcaaaactatgtgaaacaactgcagagtgaacattgaaaatctttgcaaggggcagcaggatttcatgaagtcaatgaaagtgatgttggagagctacttgcaatgcagagaataacattgttaagtgaggaacttgcagtgagactggttaacaacagaaaaggagatgacaggtggatgatagtgatgaacactttgaaataaaatgaatgggctgggagcggtggcttatgcctgtaatcctagcactttgggaggctgaggcgggcagatcacctgaggtcagaagttcaagaccagcctggccaacatggcgaaaccccgtctctactaacaatgcaagaaaagtagccaggcatggtggcaggtgcctgtaatcccagctactcgggaggctgaggcaggagaatcgctggaacctgggaggcagaggttgcagtgagctgagatcacgctactgcactccagcctgggcgggggagcgagactctgtctcaaataaataaataaataaataaatggaatgaatggatgatcaaatggtttaaaaagccctctgaggcaccttgttttggcccacaaaatgattcccaacaaagttcaagattacataactgcctttaggtttttgaggaatcaccacactgtcttccacaatagttgaactaatttacattcccaccaaaagtgtaaaagcattcctttttctcccattaccgggtacatgcccaaaggaatataaattattctattgtaaagacacatgcatgtgtatgtttattgcagcaatattcacaattgcaaagacatggaaccaacctaaatgcccatcaatgacagactggataaagaaaatgtggtacatatataccatggaatactatgcaaccatagaaaggaacaagatcatgtcctttgcagggatgtggatggagctggaagccattatcctcagcaaactaacacaggaacagaaaaccaaataccgcatgttctcacttaaaagcgggagctgaatgatgagaacacatggacacatagaggggaacaacacacactggggcctttttgaaggtggggggtgggagggagagcatcaggaagaagagctaatggatgctgggcttaatatctaggtgatggtatgatctgtgcagcaaaccaccatggcacatgtttacctatgtaacaaacctgcacatgtaccctggaacttaaaagttggggaaaaaaattacaccactgaagtcaaagatgaaatgaaaggggttctgttgttctaccatataattttgttgggaaataaggcacgcttgaatacagtcatccctaagtatccatgagggattggttctaggaacccccaacggataacaaaatctacagatgctcaagtccctgatagaagatggcaccgtgtttgcatatagcctgtgcacatcctccagcacactttaattaattaattattcatttattttttgagacagggtctcactctgtcgcccaggctggagtgcagtggcaccatctcggctcactgcagcctcgacctcccaggctcaagtgatcctcccacctcagcctccccagtagctgggactaaaggtgtacactaccatgctcagctaattaaaaaaaaatatatatatacacatatatatattttgtagaaatatatatatacacatatatatattttgtagaaatatatatatacacatatatatattttgtagaaatatatatatacacatatatatattttgtagaaatatatatatacacatatatatattttgtagaaatatatatatacacatatatatattttgtagaaatatatatatacacatatatatattttgtagaaatatatatatacacatatatatattttgtagaaatatatatatacacatatatatattttgtagaaatatatatatacacatatatatattttgtagaaatatatatatacacatatatatattttgtagaaatatatatatacacatatatatattttgtagaaatatatatatacacatatatatattttgtagaaatatatatatacacatatatattttgtagaaatatatatatacacatatatttatatattttttgtagagataatcttactatgttgcccaggcaagtcttaaactcctggcctcaagcaatcctcctgtctcagcctcccaaagtgctaggattaaaggcatgagccactgcgcctagcccagtatgctttaagtcatctctagattaattataatacccaagatcatgtaaatgctatgtaaacagttgttgtattgcttagggaataatgacaagaaaaaagtctgtacatgttcagtacaggcacaaccatcgcaggcctaattacattttacatctgcaacttgttgaacccatggttggttgaacctgtggattcagtgtatagggctgactgtatcaacttttgattctttgttaattctaagaagctgatcatgtttggaattactatttaaactttgttgaacacaatttaaaaaattaactgaggcttagaaagtgtggcttcattttacaggacaaagtcccaattgcctctctctcctcacccccacacccggtgctccctgtgaaatttggattcctgtattcagtggattcagtttaagcagctttttccagtacttagtactctgaaatgaataggtttcctctagcactttcttacttaaaatcatattataaccaccattatctttgatggctacattcatttaatttatttacttattccttttttaatgaacttttaataatgtttctgatgagatgcttttaaaagcaataaggaaataagtaatgatatgtctttgtgcgtttagctgtgaggattttatcccacgtgtggaattactggattagatgcgaaattgcaacatttgtatggctcttgatacatatttctcagtgtctttccaaactggctgtagaaatgtaccctgccatcagaaacatttggagagatatttctactcctcacagattacgtatatttgttaaacaccactgtgggccaggcgctgttctaggcacctgggatacagcccagaatgagatgacctccaatagttgccctcatggaacagacagtcaaattcagaaaaatagacaacaaacaaataattgttcaatatgttagacatgatgtattatagaaatgtagggtggtgatacaagagctaagaagaaattatttaggcagatagggtatgagcgtcctcaataaggttttccttttcatgaaaagcagcccccaaattatttcttttctaacaaagagcagcctgtaaaattgagctgcagacatagacaagcaggctggaaacttgccaggtgaatgccggcagctgtgccaataggaaaaggctacctgggactaggcatgttcaaaatggcggcctcatcttcccttctctttgtcagccacgtgtacagtaaggagcagataacatggcaccagcgaggcaaagatcccatttgcataagattagggcgagccatccagcttccccatgtgctatgtaaacatcacacctggtccaaccaatccttgggccctatgcaaatcagacaccgccccctcaagcctgtctataaactggtgcactctgccatgggtgggaagtcccattcggaagcccctctcacacaagagagagagttattctcctttctctttcttttgcctattaaacctctactcctaaacccacttcttgtgtccgtgtcctcgatttccttggtgtgagaggacgaacttcgcagatttaccccagacaacaacaccgcttcagcgggatccagagaggatgatcagggaagcttccttggtaagataaaattcaagcagacacttgaaggcggcgaggaaggataccatcaaaaatccgtgggaagagcattctagcacgagggaacagctatgcgaaggctctggggcaggaatgtgctttgtgtgcaccgagaagtagatgggtgcagatcatgcagggtcttgtggaccacaggggggactttggctcctatcgtgagtgagggaggagctgtggaagattctgagcagaggaggggcgttacctggctcaggtgttcacaggtgccctctggccacgagagcagatgggaaagaaagcagaagctgggagggggaggaagaggaaaccacactgggttaggtggggggccgtgaccaggtgggtaccacggtgagttaattctggttatgttgagatggtaaagcagacaggtgtggcttatggattggaagtggaggatgcctggaggagaggagtcaagaatgtctcagggattttgacatgagcagtctgaggacacagctctgctatcagctgaggggaagaaaactggggcggggaagtgggagggtgggggtagtgttgggggaagataacaattcactcaccacttcccccttgaattatagaatcaccccacagcagtattcataaagaatgaaaatgcaaacatctattaataattattcgcaaatgctgcatattagccagtttagataaaccctgctctctgggaattttgccagaaaaaaatccccaaataagcttctacagctctcaaagccaataaaatgccatcagggagtagacggagaatggcaaagtcccttcctcatgtgagaatctgtttaatctaacattaccatgccttcatctacccttctgtaagacccaggattgtctgaacacaaagataaacataacagagctatagaaagacgtgaagtgagaaaacaaaataatcgtgggggataggatgtttggcaagactagatgaggacttctcaagctaggagatgattacacctaactagctccactaactagctgccgtagtggaactacgggcagttccactcttctttctctctttgctgcctaaccctcaccaatgctggatggattagaatctgtgtctctgcttccattgttgtttgcggccaccttgatcatacaaactgccctgctgtagtctattgtttatttactcatgcaacaaacaattattaagcttctactatgttgcaggcactgcactggatgcttgagatagagtgtttcggagaccacctgttacccacccacccattatcccctcataacttccctagctttcagaacccagcaataaaacagaactacatttcctgggcacttttgcagagagatgtggccacatgaacagttctggccaatcaaccataaggatgctgatctcaactgacctttgtcctttgaccttcttcctcctttctgtctgaagcactgatgtgatggctggagcagcagcagccatcctgagactgaccatgaggaaaagaccaagctgaccttggtcttggctgaacatccttgggccactgcagcatttttattttatatgcaaccaaataaaattttcgactgatgcacatgtatgttctgaaaaagttgtctttttattagcctgtttctccacataagacttcttgaggctgggtgcagtggctcacacctggaatctcagcactttgggaggccaaggcaggaggaacacttgaggccaggaatttgagaccagctgggcaacacagcgagaccctgcctctactaaaaacacaaaaattagctgggtttggtggcacacacctgtagtcccagcttctcaggaggctgaggtgggaggatcaattgagcccaggaggttgaagctgcagtgagctatgatcatgtcacgacactttatcctgggcaacagcacgagaccctgtctcaagggataaacaaataataaaagtaacagtaaaaaggaagacttcatgagtgcagaaaccaattttatttagcttcataagccctcaagaaatgtcagatgaattcatgaatgagtaaggtagcatgacttttataatttaaaacgcagcaggcccaggaagggcatcttcttcccctattcgctctctgcttgggtgccacatctctggcagtggctgatcccttccgtgatgacagctactgccagcagctcctccctcatcgttccagctgccactggctccaatgttgcaatttcttcaatccaaggattgtaggggcttcctgctattgctagcctctgggtgcccaacatcccacatgggttaactctgtccacacctctgtaaggaagtccttccttttcttttctttctttctttctttttatatatatatttatttatttattttgagacaggttctctctctgttgcccaggctggagtgcattgacatgatcacagcacactacatccttaaccttccagactcaggtgatcctcctgcctcagccccgccgagtagctgggactacaggcatatgccaccacgcctggctaatttttgatttttttgtagagatggggtctcactatgttgcccaggctggtctcaaactcctgggctcaagtgatccacccacctcagcctcccaaagtgctgggatcacaagcatgagccaccacacccagcaaagctcctccttaatgcctcttcctttgaaatatctgggggctggagagtgaactctgtttcctctgtagactctgagagacactccccaccaggtggtaagttcaagggcacagaacacatatccgctttactcactagtaccccggacccagcacaggttctgccatggagaagttgctcaatgaatatttatagaataactaacttcacttcccattaaataaaccagaataaaaataataaggtgatgccatttttgtctattaaattaacaaaaaatatatatatatttttgagacagggtcttgctctattgcccagggtggagtgtagtggtgcactcacggctaactgcagcctcaacttcccaggctcaagcaatcgtcccatctcagcctccatagaagctgggactacaggtgcgtgccaccacgtctggctaatttttgtatttttagtagatatggagtttccccacattggtcttcaactcctgggctcaggcaattttcccaccttggcctcccaaagtgtgagatcacaggcatgagccactgtgcctggcccaaaaaatgtttttaaaacaataaaacccaatgctggtctgtgtgcattgaaatgaatagacttcagcgttgctgttaaatgtgtaaattgatacaaccctttggaaaaaccatatatataagaaaccattaaaatagtactcatttttgactcagtaaaactactcctggaaatctaatacaaagaaatgaatcccagtgaagggaaaatgtatgtaaagatttgattgtagcattatgtataatgtcaaaatatacccaacagtaggttataaggaaaagacccttctataggcattaaaatgacagtatgggatggagggagggagggaagaaggaaagaagggagggagggagagagaaagggaaggaggaagggagagagggaagaaaaagaagaaagaaagaaaaggaaggaagagaaggaaagaaagaaaaagtaagggaggagggagggagaaaaggaggggagaaagggaaggaaaagaaagagaaaaaagaaagaaaaggaaggaaggaaagagagaggtgaaaggagggaaggatgggaggaaggaaggaaaaaatgaacaaaggaaggaaagaaggaacggggcaggaaaaagtgaatgggggtgcagtagtttcaattttacatagctgaggtcgagaaggtgactgtgagcagagacctgaaggaggtgaggcagaaattagtcacaagaataagaaaaaaaatgtaagaaagagatgttaacagttaggtattaacaactgtgtgtggactcattaataaatatctttgagcccctgatccatgctaaggatgcattagaggcaaaactggacatagtctttatcttttttttttttttgagacagcgtcttgctctgttgcccaggctggagtgcagtggcactatctcagctcactgcaacctccgcctcctgggttcaagtgatcctcatgcctcagcctccaaagtagctgggactacagctgtgtaccatcatgcccggctaatttttgtattttttgtagagacagggtttcaccatgttagccaggctggtctcaaactcctgacctcagatgatccacctgcctcagcctcccaaagttctgggattacaggcatgcaccaccatgcctggctaatttttgtagagatgggggtctcactatgttgcccaggtgggtctcgaactcctgagctcaagcgatctgccggcctcggcatcccaaagtgctgggattacaggcatgagccaccgtgagcggccagtccttatctttatactaactaaatgagaaaatcaataagagcgaattagaatgttgatgtgggtaatgaaagaaaggcatatgatgctagaaaaatatatactcagaggtattggggagagagacagatgcatgaatagaggtaaagggatacagagaaagaaaaagaaacaaagagatggagagagagggaaagagagaatgtggggaggaggggacagaaacaaggagagacagagacagagagagatgtcaatgaggtgaattatatttgggactctctgaattctcttttccacagctgaataataacagtaatagcccagtaattagtatacaactgctcaacctctctctcttgcctggagctggcaagaaaaataaccaatcgtactgaagaaaggaccaaggacttagggagaaattgaaagaaaaagcagcctagaaatcatgcattggagaaaaacagaatctgaaggttgtggcaaagcgaagagaccctgagattaggagggaaagtggatatgctttttcttaaaaaaagatatttctaaaggagtttctgatgttaaatgggatctcggcagaatgaaataacaaggcttttaactctaaagccctatccatcttcccagggaatgttcctgacccttcagcaccaaaagcaaacccttcgtacctgtgcttttccctccagttttggtacattgtggacataggtgttcgtttatccaaccaccctctctggtcccatttgtagcagagataatgctatggatctggcaaatcccattttcttttccttcctgggatacgtacagcaaagggacatattccagctctcactgaagttcgttgggccctgggactacattctggctaatggcatttaggtaaaagtgatgtgaaccacttctaagcctaacccatacaaaatgtccagcataattctctgtgtacaaattcagaagcaattaggggaaagcagaggcccttcctagacaatggcaaagccacaagatgggaggaccctgaatccctgcgtcactgcctggagaagagtctcccaggaagtacaaccattatggagaagtttggaggttcctcaaaaaactaaaaatagagccaccatatgatccagcaatcctgccgctgggtatatacccaaaagaaagaaaatagtatatcgaagagatatctgcactcccatgtttattgcagcactattcacaatagccaaaatttggaaacaactcaagtgtccatcaacagatgaatggataaagaaaatatggtacatatacacagtggagtactgctcagccataaaaaagaatgagatcctgtcatttgcaacaacatggatggaaccggaagtcattatgttaaggaaaataagccagggacagaaagacaaacttcgcatgttctcacttatttgtgggagttaaaaattaaaacaattgcactcatggagatagagagtagaatgatggttaccagaagctaagaaggggagtggatgggggtggaggaggaatgtttaataagtacaaaaaaatagaaaagaatgaataagatgtagtatttgatagtacaacagggtgactatagtcaatgataatttatttgtatatttaaaaataactaaaagagcataattggattgtaacacaaaggataaatgcttgaggtgaaagatacctcatttttccatatgtaattattacacattgcatgcctgtatcaaaatatcccatatatcatatatatatacacatatatatataatgtatacacacatatataatatatatatacacacatatatataatatatatatatacatatatataatatatatatataatatatatatatatactatgtacctacaaaaaattttttaaaaagagaaaagcctactgggagaaaacatctatctcggatagttgagtgaacaagaaggacactttcaccatgttcaacctctgagaattcagggtttatttgttatagcagctaatatcccttatcctatctaatacaccatccatcttggacagtagagtgagcaagaaggaaacgctcactgtgttcagccactgagagttcagggcttagctgtcacagcagctaaatcccttatcctgtataatacaccctttccataacagtgtgtgtagattttgagaagagtttacattccctccaattctgcttctaaacctttattttcctgcctttgagaaagaattcatactccttcaaggctcagaccatccatccagcatcttcaccacctcccatctctgccattgtcctctccaagctgtttcttgcctctgtctctttgcccttgcactcatctccacctggaatgccaaaggggcactgcagacaatgtgtgtttcaaccaaaatggacagagatgctgtttgctgctgcaggacagattaaaaactctttggaagcctcatacccatgactttggccttggagatactgctgtccagccactaggcaaaccaagcacacaagctgttaacccagttactaaggcagagagctgggagttacttttgactcctccctctccctcatcccactattctatcagtcaccaagatgtattgattctacatccagatacctctcaaatccatccactttcatcaccattgcttccatcaaattccaggccaccatcatctcttaggataaattccaattctgttaatgtggcccagaggtcctgtgtgatctggcccctgccccaaccccagcctcttccctctcagactctatattctaactgacttggactcctttcaattctttaaatgcaccatattcttttcctgcctttggacctttgagatactgctcccacagccaaaacactcctcttcttctttcccagctaaacttctactcattctctaggtttcagcttaaatgctcctttatccaagaagccttctttgagtttgttaaatggcattcgactctgtgattataaaccatgtcctgcatttagagcactgcatttacctgctagactggtaagctgaccagcagcgccaacatctgcattgttcattattgtgatttcagggtcaagcatggggcatgacatatagtaggtgcttactaaaatattgttgaataaattttaaaaatggatggatggacagatgatttgatggatggatagatgatttgatggatggatggatggatgagtgaatggatgatttaatggatgaatgattgggatagatgatttgatgaatggatggatgggtaaatgagtgaatggatgaatgaatggatggataaatgagtgaatgattgatggaaggatgaatggaagaacggatggctgaataaatttcttcaagatgctgagtgtgaatctgtgactccaaaagaaaccaaagataactatcatctggacaaccctaaaaccagaagttccatgagactacattcttgctcatctttgcttttgtggaccttgaattctctttgggagtgagtagataatggcaaggaagcaaagacaatagaaaacatacaaataaaccaggtggcaccagaagatgacacacaccacatgctctaaaggggtggcatttgatccaagaccccaggcacttaaaattaaaattaaacaagtgagaatgccaattccatgccaaaaatcaagccaaatgatcctcggaatgtgttgactggcaatgatagctgggatttaaaaatagacttatcaacctattatgcatgtcctgcctttgcttcagtaatcactttccccaggtcccaaggaaatacaaaatggcccttaaacagatgacaaggggaccattttcactcataataagagaagaccaattaaaattgtattgagatgccatttttcacctaccttatgggcaaaagcatgataacacacgctgctggcagggccgaggggcaccagacaatcacctgtatcgctgatgggagtggaaactggtacaatctccatggaggatcatttggcaaaattcaccaagattacccatatctttaccctttgacccagcaatccagtttctccaaatttatcccattgtctatgataccctgatatgtttttatctattttttttaattcatttttgaggcagccttgctttgttgcccaggctggagtgcagtggcacgatcatggctcactgcagccttgaacccctgggctcaaggtgatctgcccaccttagcctcccgaggagctaggactacaggtgcctgccagctaatttaaaaagaattttttttagagacggagtcttgctattactcagcctcccgagtagctgggattacgggcatgagccaccacacccagcaactgacatgttttaaaaagtgacatatgtgtggcccatacctgtgatttcagcactttgggaggctgaggtgggaggatttcttgagacccagagtttgagaccagcttgggcaacatagcaagaccccatctctacaaaaaacaaattttgcattggtagtcccagctacttgggaggctgaggcaggaggatcacctgagcccaggaggccaaggttttagtaagctatgattgcatcaccacactcctgcctaagtgacagagtgagatcctgtctcaaaaggaaaggaaaggaaaggaaatgaaaggaaaggaaaggaaaggaaaggaaaggaaaggaaaggaaaggaaaggaaaggaaaggaaaggagggcatatgtacaaagttactcattattagactgtatgtaatggcaggatattgcaaacaacccatgaatctatcaatagaggctggtttaataaattatggaccactacataaaaataataatcatagcctagacacatcacttacttcattcatgcctagcatgattctaaatgtgttatatgtaataattcataataaccatagcaggtgcactctaaccacttttctatgttataggtgaagacactgaagcacagagaggatcagtgacttgcccaagatcacacagcctggaagcagcaaatcaggtcagtgaggggagctggtcccttgaggggctggaagcaggcacaatgatgtagctataaaaggaagaagcccaagagagctgtttgggccaggcgtggtgactcatacctgtaatctcagcactttgggaggccaaggcaggcaaattgcttggggtcagaagttcgagaccagcctgaccaacatggcgaaaccttgtctctaccaaaagtacaaaaattagctgaggagggtgggtggtgtgtgcctgtagtcccagctactcgggaggctgaggcaggaggatcgcttgaactcaggaggtggaggttacagtgagccgagatggcaacactgcattccaccctgggcgacagagggagactctgtctccaaaaaagaaaaaaaaaaaaaaaagctgtttgatgcacaaggatgataaatgacagtgggtcgggccataggatgctgtagggtcaccttctgctcacacacaggttcccaggaagataatggtgggtgggatggaagagggagcctcagtttctctgtcttcctcagctgtctctgcactctcgaccacacagttgtaatattgcctctctgaaaataaggaagcttctgccaaactaatctggaaagatctccaagaacatattgttaggtgaaaaaaagcaagatgctgaactgcatgtagagtatacgctcccttatgtaagaagagaggggaaagtaaaataaatattttacatttgcgcacatttcatgtgtttgcatgaactaactctgggaagacatacaagaaagcaataaatgtttcaggggaaggagatgaaagtggggagggggatggggcagattggggaatggtaggagatgtaaaaggattaactactgaaacattagcatttaattttgaaattgccagagaagcttacgggtacttgagaaaagcatcattcgtctttttttttttttctcactcttgtcgccttggctggagtgcagtggcatgatctcggctcactgcaacctttgtctcccaggttcaagcgattcttctcctgcctcagcctcccaagtagctggaactacaggcgcgtgccaccatgcccagctaatttttgtatttttagtagagatgaggtttcaccatgttggccaggctggtctcgaactcctgacctcaaatgatccacctgcctcggcctcccaaagtgctgggattacaggtgtgagccaccacacccagccgctcatctaattattgacagggcacgtgccttgcagttttcttgagtccccaccactccctattgtctgcctgatgttgaattctcatctcatctaaagctgagttactctcagctccagctccttattgctacccctgaatgtgggtccaaagtggctagcttctcttatttttcaagagaagtggaaaaccatatttttataagaaaccttccagattttaaatgttggcaaggattaaatttttagaaaatgagaatttctgtggcctatatacaacctctgatccagatgaatccagaatctgtgtgtcctcaggaaatcccccggaggttgttttgcttgactgagtggcagagtttgtagcactctaaggacctgtagggcaactgttctacatactgtttgaaaacagagaagtcaagagccaataaaaaaggctggggaggggactccatgtatggttgctcaaggcgtgcactgcacaagtgctcctggccacatgagagagaggagagctgaaatacaactcactgatggagtgcttcatgatggatggatcaagctggtgacatctgaacccttgtcaaattcaacatcactaaatgagaggcagccagacgtgatgtgccacccaatgaagcaagatgtaccagtcatcatcaaagaattatccttgcaaacacaaccaagcataaaacagaaacattgaaactgaatctgattcatcctctagatcagggatcaccaaactatggccccctagtcaaatctagcctactgcctgatcttgtaaataaggtttcactgggacacagccacactcatttatttaagtattgtctgtgccttgctttcacactgcaaaggcagagttgaaaccatatgaactgcaatacctagaagacgcattatccagatttttacagaaaagttcaccaaccccaggtctagatctagccccccgttcacaggaaatacaggggagagaggagcacactaaatcaacaccatgaggcacgcaatcagcagaatccaaagtgtggaacagcctccaggacaaatgatccagtttcttccacaaataaatggcaagcaaacaaaagaaggaggcaaaactgttcaagattccaagagtcttataagatacatcagccaatcagggaaatggggataacgactggctgttcagtgagtcttaaggaaataacagccattttgggtagatgtgaaaatgacatagtgctaaatgcaatataatatttggggttggatcacggaacagcaaaaacggcattaatgaaaaaaagggtaaaatctgaatagagtctgtgatttagtgaatggtgacaaatcacagtaatgtaagatggtaacaacaggaggggctagatgaggtgtatgtagaaacactctattatcttggcaatttttctataaatctaaaattattcccaaatgtaaagtttgttttaagacaatggtcttgtgattgcagttttgttttgtctttgttgtttgaaacaggatcttgctctgtcgccaggctggagtgcagtggcacgatcatagcttactgcagcctccaactcctggcctcaagcaatcatcttgcttcagcttcctgagtagctaggatacaggtgcacaccaccactcctggtaaattaaaaataacaataattgtagtgatgagatctttctatgttgcctaggctggtctcaaactcctggcctcaagtgatccacccacctcagcctccaaaagcaccaagattacaggataatccactgcacctggctagactgtactttctaatacacagtgtctcttagagtctattagattagactccaatcatctgtaacattaacagatacaatgatgcaatgactagactttgctttaaaataatacagcaaagtgcagataataggtgagagcataaagaaactagatttgccaaatattgatatttattgaagtcaggaaatagattcctgaagatcgtctttatgtttctctccattttggggtgagtttgaaaatgttcataataaaaagtggttttgaaaattgttttaaattaagcctacatgcatttaaacatgttccctaggatgggctgtggctgcctggaagaaaggcaactttatcttatcagaaggcactttccaccaaccaggcaatgtgtcctggcttgtagattccctctgcatgtccatcagggtgccgggtgctggcatccctctttgtggaatgatgggatgacgggggtgtctcacccctggagctcctatgtttacccccaacctaactcaaccaactccatgtgacattgtagaatctgcctcaagtcctgttgcatcctcaagtcctgttgcatggctggctgtgaccacaaagggacccaactttcaaacacactttaatttgggtaataaacagcccacaaaaaaattactggagacatctgcaaagaattcttatctttcacaaaagtcatgggaaactacccttttcaaccattccactgggtataaacaggaaaacaggtagcttcgactgcagtggcagctatcttaagattttggctccttgagaggtgaaaatagtgctggatcaaccccatcctgaagcccacaccaccactggacttacagtcatgaaaaccagtaccttcccttgctgttcaatctgcttgagtttgctgtgacttgcagcccaacaccctttcctggtgggaccacataaaactgtatcagttcatgcaaatctgtacagatttgccaagtgagcccaacaatgcatttgagatggtcaaaccaggagtcccagtttaggtcctgctgggagccctaatccaaataatacaggttttaaaaagcattaataaccaggtctaaacagattcaaagcccttttcacaacccctattcaattaagcagccagccacttgtcaaatacttctgcaacccattccctcctctctgcccctgtgaccactcaattctggcctccatcatcatttgcttggactgtagcagtatcttccctcctggttctcctcctctagtatcatttttctccaaccgtcccttacactggccccagatggccttttctaacttacacatctgatcgaggagatggtaaaactttttttttttttttttgagacagagtcttgctcagtcccccaggctgcagtgcagtggcacgatctcggctcactgcaagctctgcctcccagtttcacaccattctcctgcctcagcctcctgagtagctgggactacaggcgcccaccaccacgccggctaattttttttttgtatttttagtagagacggggtttcaccatattagccaggatggtctcgatctcctgacctcgtgatccacccgcctcggcctcccaaagtgctgggattacaggcatgagccaccgcgcccggccctaactttttttttttttttttttttttttttaaagagacggggtctttcttttttgcccaggctggagtgcagtggcataatcatagctcactatagcctccaactcctggtctcaagtgatcctcctgtcacagcctcctgagtagttaggattacaggtgagtgtcatcccaggcacctaatttttatttttttagtttgttttgtagagacgaggtctcactatgttgcccaggctggtctcgaattcctggcctcaagtgattctcctgcctttggcttcccaaagtgctgggatcacagacgtgagccaccacgctggcaaaactctttaataactctctctttctaattgtggcaaaattcacacaacataaactttaccatcttaaccatttttaagtgcacaggttagtagattaagtggtcatgtggttgtacaagcatcagcatcatcaatctgcaaaactttctcatcttcccaaactgcaactctgtcaccattaaactataactccccattccctcttccctacctgctggcacccaccattctactttctgtctctatgaatttgactactctagggaccttatataagtggaatcatatagtatttgtccttttgggtcaggtttatttcactgagcacaatgtcctctgggttcatccatgttatggcacatatcagagttccctcactgagaatctcattgtttaggaatttttatggaagcttcattttgtaggcatgattcattaaatcactgaccactggtgattaaagagatgaaagagctcaatctccagcttctctccactccctgggggctgaagggtgggattgaaaatcccaaccctggccgggcacagtggctcacgcctgtaatcccagcactttgggaggccaaggcgggtgtatcacttgaggtcaggggttcgagaccagcctgatcaacatggcgaaaccccgtctctactaaaaatacaaaattagccgagcatgatggaacatgactgtaatctcagctacttggaaggctgagggaggagaattgcttgaacctgggaggtggaagttgcagtgagccgagattgtgccgttgcactccagtctgggcaacaagagcgaaactctgcctcaaaaaaaaaaaaaaaaaaaaaaaagaaaagaaaatctcaaccttttaatcatatcttggtttttctggtgaccaggccccatcctgaaaccatctaggcaccccgaaccaatcattagcgtacccaagagactcttatcattcaggagattctaagggtcttagaagcttttgtattaggaaccctagactaagactgaacataacaaaagatgctcctatcatctttattactcaggaaattacaagagttttaagagcgctgtaccaggaatcagggatgaagatcaaatatgtatttcttattatatcataataacagcagaggacactatttaacctactgaagtaatacaagcagtaaagtaggtgtggaaaaactgaaatggtgtctggaatcaacaaagtgtgggacacaaccagacaagaaatcatttgacccctaactctgtcacccactctgtgtcctgcaagagctggcttcaccttgagcatgtcacaggaactggggacagagaccaagtattttttattataccacaggttgatgacctcattccagcccctgaataggccatttctgaaaccggacattacgtcagcccctggatacagccattcctgaaacctgacagtagttcaccccctggatacaaccattcctgaaacctgacattatttcagcacctggatacagccattcctgaaacctgacaatagttcaccccctggatacaaccattcctgaaagctgaccttatttcagcccctggttacagccattcctgaaaactaacattatttcagccccaggatacaaccattcctgaaagctgaaataaggtcagctaccttatttcagcctctagatacagccattcctggagcctacatttaaatgacttgagtcaataaatcccccttaccccagtttttaatctaagtctgtttgcattgtgtctcttgcaatttaaagaattctgatagatacccctgggctatcccgtccatctggaatggcctccccagcccaccacattcattagcctgacacactctggctcacctcccaccttgacccaatgcttcctcctctgggaaggcttccgtgattccatagagcaaacctaagggtgcctatttcactccgaacattcctccctgcagcattcatctggcaccgtgacgattgttgatttctgtgttggctgccctagattgttcgttcctgaggggtgagcactgtggtctcttcgtgtttgtgttcccagccctgaccccagcagcatccagtaaatagctgttgtgttgaatgaaccagtaagtgaatgattaaatagtaaaaagtgttgccttcctctgacaatggatttatttttaaaaagggtaagaaaaacaaaaggctgtaccactgatggtggctgcagggctcatgcatgcattctctcctctgattaaatagcaggcaaggtgtgtgggaagggaacagagggacctcagagacaggcagataaacgagtgggtggctcttgccagcagtaagcctttctttcatctgctgtatggccaacccctgcccccagtgcccacttgccaggctaatctcctctggatccccagaaacaataagaaataatttgtctgaggggggaatcggatgggaaagggggaggaagatatgtccattccattccagctggctccagctctcccccactgctccctgagctagccgaatgcatcttctaatttagttcattcttctcttcctagccattggtaatagacccacacagaacacttggaatttaaccatccttcctccccataagagaaagggagagtgagaagatatgcaaaagagacatagaaaggggaaagaaaagaagggaaaagataaaagaagaatgatcacagtaatggctaagaaatatcattcttactatgcgccaggcacttagctgacaacctaacatgtattaactcaattcattctccttgaaactgtatgggataggttccagtgttatccttattttacaaatgagaaagaggagcaaaaataaagtagaggacaaggtagggatttttgttttttcagagacagggtcttgctctgttgctctgacaggcgtgcagtggcacgatcatagcttgctgcagtctccatctcctggcaagtgatccttctgcttcaacctccccaggcatgcaccatcatgccagtctgagttttgtttgtttgtttgtttggtagagataggatctgcctttgttgcccaggccggtctcgaactcctggcttcaagaaatcatcccacctcagcatcccaaagtgctgggatcataggtatgagccactgagcccaggcaacaaggcaggaattttttaaaatctttctaaatgaaggcactggtggatccccagctctggaacacaaaacagagtaggtgctcactgaacaatactgaatgaaggtttgaaagaaatcctagcccatactgtaaagacatcatcatcaacatcatcacccattactaagtggaaaagaacatgttataaagcaacagataggtaggagatgaattttgcttatctttatacatggatgggaaaaattctgcaggaccattcaccaatagtggggatcatcttgcaggagaaatcagagatcaactcaaacacgtcaaaaacattgatttaggcctggcttggtggctcacacctgcaataccagcactttgggaagctgatgtttttattcacacttaaaactaggaaaatgtcaattgtccatggccaagaattgtgcggtggggtggggaggcaggagagatccatttattggaagtttaaaaataagaataagttagacatcagaataatggggtatagactcagaaggggtgccaaggcaccttgctggggggtcagggttgttctccatccagatgtgggtgatgttcactagttgtatacatctgtaaaaatttgtggtgctctgaacttaaagtatatgcatttttatacatcttgtcaaatgtatcttgacatcccaatttttaaaaacttttaaaatgcaaaatatttttgaattatcgacgagcacaatggcttggctggtagaaggctgctgctggagactgtaaaaggctaacgccccaggttgtaccgtgggcccatgttgtaccgtgggcccaggttgcttgtcgcccctgaggaggaaggagttagctcatccgtgccagctcccttcccatgacaacaggagagtgcagcacttagagacactggtctcagcactttttaatctgagagctttggaaaagcctccgagtcgggggaggaagaggagagctctcagaagaactggctggcaagatgctggggtggtggaaaaaaaagatgcttccaaggcaaaaaaaaaaaaggattaagaaccagctctgatgggatctgaatacactgccttggaggctggagagatttccacccatttctgcctcctctagagaaaaggcaaaaaaaaaaaaccctccagaaatgcaacatttaagcttcactaacaaaccccgccccaccaccaccaccaccaaaatgaaaatagagctcacttaaaaaaattattttttggctgggggcggtggctcacgcctgtaatcctagcactttgggaggccgaggtgggcggatcgcttgaggccaggagtttgagaccaggttgggcaacaatgtgagaccccgtctctactaaaaatacaaaaattagccaggtgtggtggcacatgcctgtaatccccactcctcgggcatgctgaggcaggagaatcacttgaacctgggaggaagagattgcagtgagccaagatcctaccactgtactccagcctgggtgacagagagagactgtctcaaaacaaacaaacaaacaaaataaaaacaaaaaaaattaaccctctaaagaatatttatccagaaagcattcccaagaaaactaggtacaaatactagatcagcctcacaaagaaaacacacatatatttttgtgttccatgactgtctagttggctggcttgggtgcgggcaggtatcccagggtccagatactacacctatagaactgtcatctaaccagaaacacaaaaatagaggcagatttctctgttcttcagcgctcaagtgctacaccactaagatttcaagactaggaactggctttgctcctggaaatgaacagaaaaggaacttttaggctaacccagggagaaagacagttatgattgtgagcgtgaagttatccgcaagtgaattatgcactttatgagtaaaggttgtaagtttttgtccttgatcagtcacctttgccactcctggatgtagaagagaaaggtggtgtctaccagcgtcctgggcatgggatggactacatttcccagatgcccttgcaattctgtgtggtcatgtgaccagggaaatgggagaggttgcaggtgcctgtttcagatctggattaggtagatagttaccacaaaggaaaatatttgtgtatctaaacatatctaaccatagaaaaaatatagtaaagacatgatataaaagataagaaatggtacatctatataggacattcatcagaaatggagcttacaggactacaggctaattcagtgaagagtgagtgagtgtgaaggtataggacattaccatacactactatagaatttacaaacaccccggtcgccccatctgggaagtgaggagcgcctctgtccggctgctgtgcaaccttccaagtgtgaagtgatagccttgtgtgtgatcttttctgtcttcccccaagtttgcatttttgacattaaagtttactttttaattaaaaatgaaaaaaaaaaaagaatttacaaacactccacacttaggccacgctacatttacaaaaaacaactctttctttcttcaataataaattaccctagtttactataactatttttactttattaactttttaatttaaaaaatttttttgtttgttttttgtttgtggagtgttgctcttgtcacctaggctggagtgcaatggcacaatcttagctcactgcaacttccacctcccgggttcaagtgattctcctgcctcagcctcctgagtagctgggattacaggcatgtgccaccacgcccagctaatttttatatttttagtagaaacagggtttcaccatgttggccaggctgatcttgaactcctgatctcaggtccacccacctcagcctcccaaagttctgggattacaggcgtgagcaattgcactagccttaaaaactttttgtaataacactttagtaatcgaagattactaaatctagatgctggtgctttttgtaataacactggaataacactgataaactttagtaataacacttagcataaaacacattgtacatctgtaaaaaatattttctttctttatatccttattctatatgcttttttctatatttaattaaaaaatagttttatttctaaaacatttttgttaaagtttaatacacaaacacacattagcctagtactatacagggtcaggatcattaagacgtcactagaaaatataaacgttttagctccgttagattttttttttttttttaatgagacagagtctcactctgttgcccaggctggagtgcagtggcacgatctcggctcactacaacctctgcctcctgggttcaagcgattctgcttcagccttctgagtagctgggattacaggcacacaccaccatacctggctaattttttttttgtatttttagtagagacggggtttcaccatgttggccaggctggtcttgaactcctgacctcaagtgatcacccgcctcagcctaccaaagtgctgggattacaagcatgagccaccgtgcccagccttccatgataatcttacggggccactttcacacatgtggtctgtcattgaccaagacatcattatgaggcacatgactgcatttatttatgaaatgacccgagaaaacaccagtagggcagaaaggaagtgagacaaggaatcgaaggcagccagtgagtggtgtgttgttgaaccaggtaccactgtgggcacctgggactgaataacactggtgagttctgggaagcagagtggaacatagaccttggaggcatccacccaagtgggagggagctggagtatttaaacaccaaccctcagtagtcattgttgggcctgctccccagcacttcaggcttgccttggttgcacacatagagaactttggctgccaggacataaagatgcagttgctgtcagccgagaattgggctggaaggtatagatatgggaagtgccagaaggatggcacgcggaatatctatagtatcagcaatggcagaaccacacaacagaaagaacctgggctcctgaatgactgcctggagcagagccactgtcatcaacctagaccgtagcaacttgaactgtaacaattgagaggaaaatactcccaccctctttaaggcattgaaatattaatagtattggggttctttgttaacagcagcctagccttatcctaacagatatatcagcctttttttctactgagcctgagagctgcaatttcagagagaagagcacccaacattgaggatttgcagttttgatgcatcatttcactgagtgttcctgagaagcctctgccaactcatttggtagcccaccaataataacccctcagtaaattttgagggagggagtacacccaaaaatgctggaagttaacacccctggaaacaattaatgtcctcaacccatgagtaatgagaattgttggataaataccccagctccctcacctctaaagtaggatgcctgaggtctatgctatcctcctccagtgcttcctgatggggctgagccccaattgcccacagtgatgacttaataacataccattcactagctaccttcccttcccttccctctttcacttcccctctcgcctatgggtatttcctggagtaacctcccaaatgactattcgcacttgaattcttttctcagagtctgcctcaggagaccccaaacgaagcctggggataaattattatcacctttaatgcacagaccaggacacatagaaagaccacagtcatcccaggttatgcagcaaggaggtaacatagctgagacccaaattcccatcttgactccaggattcaacctcttaactccattgctgtccagcaagctggacttctccacaagggaatcctcccccgtcaagcacatttatgggtaaagccaccctcatcatctctttcccacaggcttgtgactgtccaggctttaaatataaatttggcaaacatttattaagcacccacagtataccaagtactaacaccacattgattcattgaccctgctctcaaatagctgaaggtcaaactagggagcaaatatttgaagggagaaacaccaaaccaactgggaggttgtaatcatggctgctgctcactgctcaggctgttacaatggtgaaatataccacataagttcatagatagccactgtcctgagttatgatggttaattttgtatgtgaatgtgactgggctatgggatgcccagatatttgcttaaacatgatttctgggtgtgtctgtgagggtgggtattagcccgttttcatgttgctgataaagacataccagagaccgggtaatttataaagaaaaagaggtttaatggactcacagttccacatggctggggaggcctcacaatcatggtagaaggcaaaaggcacatcttacttgacagcagacaagagagaagaaccaagtgagagggatttccccttataaaaccatcagatctcatgagacttattcactaccatgagaacagtatggggcaaccacccccatgattcagttatctcccaccgggttcctcccacagcacatggaaattatgggagttacaatttcaagatgagatttgggtggggacacagccaaatcatatcagggtgattctgaaagagattagcgtttgcagtgggggactcagtaaagcagatggccctccgcagtgtagctgggcattgtcccatctgttgaggggctgaatagaacaaaaaagtggaggaaggttgaattaactctgctggactgcggagctgggacatcaattttctcctgcccttggtgctcctggttctcaggccttcagacctggactggaatcagccctctggttctcaagccttcaaaatacaccaccagctttcttgggtctccagcttgcagatggcaaatcaggggacttcttagtttctataattacatgaaccaataccttatagtacaccctctcctacatgtatacacatgtaaggccaacaggataaatatagacatagacgtggatatacacgtgggtatgaatagacatagatgaagatggacataggcatagatggagatggagttagagatataggcttcatcctattgtttctgcttctctggagaactttgattaatatatgagtacccctgagggccccccacctgctctctgggtccttcctccaagccaccctagacctccttttgacccatcaaataaagggatagggccaggcatggtggctcacacctgcaatcccagcactttgggaggcagaggcaggcagatcacctgaggtcaggagttcaagaccagcctggccaacatggcgaaaccccgtctctactaaaaatacaaaaattagcacagcatggtggctcatgcctgtaatcccagctagtagggaggttgaggcaggagaatcacttgaacctgggaggtgggggttgcagtgagctgagaattctggaattctagaattcagttctggaatatagaattcctagaccaaggtttcaacacgccacttcactccagcccgggtgacagagcaagactccatctcaaaaaataataataataaaataaaaataaataaagggatagttcgggcactcaggaaaaccctgggctcccagtccctagctatgggtcatgtgcacactgatgggctgatgcctgtgccagatctgattatcatagagatgcatcctcagtggggaggacaaggaaggcgtcatccgctttacctgagctggtcaggtaaggcccagactaggttgtttttttattaatccagaaaacagcaacctatggtgggtataaagttctttggtgggggtgataaaaatgttacgaaattagatggtgttgttgattatacaatctagaacgtgctaaaaaccactgaattgtacactttaaaggggtgaattttaaggtatgtgagttatagcccaataaagctgtttatttatttatttatttatttttgaggcaagatctcactctgttgcccaggctgggatgcaggggcacaatcacagcactctgtagcctggaactcctgggctcaagccatcctcctgcctcagctccctgagtagctgggactacaggtgcaccaccatacctggataattttctttttttttttttttttggtagaaacaaggtcttgctatgttgcccaggctggtctcgaactcctggcttcaagagatcctcctgcctcagcttctcaaagcgctagaattacaggcgtgagccactgtgcctcgccaaagctcttgttttatttaaaggaaagaaaacaacagcctaaaccccatttcctgacacccccgtgcatcgagattggggccagagtgaggagaatgagcactggctttgagcacaaaattaaacacttacacgctgggctatttgagtttgctacggctgccgtgacaaggcaccacactgagtggattcagcaaaaaaacagactgtctctcagttctggaatctagaattcatagatcaaggtgtcaacggggctatcctccctctgaaggtgcggaggaaggatttgttccaggtctctctcctggcttcaggtcgtctctcagcatatggcagcacaactccaatctttttattttatttatttatttatttgagacgtagtctgactctgtcgccaggctggagtgcagtggtgcgatcttggctgactgcaacctctacttcctgggttcaagcgattctcctgcctcagcctcccgagtagctgggattacaggcgtgcaccaccacgcccagctaatttttgtatttttagtagagatagggtttcactatgttggcaaggatggtctccatctcttttttttttttttttttttgagacggagtctcactctgtcacccaggctggagtgcagtggcgccatctctgctcactgcaagctctgcctcccgggttcacgccattctccagcctcagcctcccgagtagctgggattacaggcgtgcgccaccatgcccagctaatttttgtatttttagtagagattgggtttcactatgttggcgaggatggtctccatctcttgacctcgtgttccgccccccttggcctcccaaagtgctgggattacaggcatgagccaccgcactcggccccacaactccagtctttacacaacattctcccaagtgcacatggctgtgtccagttttcccctttctatatggacgacccactcacattggattaggggcccacctcatcttaactaattatgtctccaactatgtctgcaatttccaaaaaagttcacattctagggtactcaagatgctatagtcttaatgttgtgtctctccaaaatttgtatgtttttttgttgtcatttctggtttttttgtttgtttttgttttgagatgaagtcttgctctgttgtccaggctggagtgcagtggtgcaatctcagctcactgcaacctctgcttcctgtgttcaagtaattctcccacctcagcctcctgagtagttgggattataggcacccgccaccacgcccagctgatttttgtatttttagtagagacaaggtttcaccatgttggccaggctggtcttgaactcctggccttgagtgatccgcctgcctcagcctcccaaagtgctgggattacagacgtgagccactgccccagcccactatttgcatgttgatacttagtccacagtgcaatagtattaagagggaggactttgagaggtgattaggtcatgagtactgcaccttcacgaatgggaatagtgcctttataaaagaggctcaagggtggttcatgcctgtaatctcagcacattgcaaagccaagacaaaaggattgctcgagcccaggagtttgagaccagtctgagcaacacaggaagatcccgtctctaccaaaaaatttttaaaattagccaagtgtggtggtgtgcctttgtggtctcagctattcaggaggctgaggcgggaggattgcttgagcctgggaggtcgaggctgcagtgagccatgattgcaccactacactccagcctgggcagcctatctcaaaaaacaaaacaaaacaacaacaacaaaaaaaaaaagagagagagattccaaggagtctgcttgccacgtccactatttgaagacacaatgtgctgtctatgaggaagggccctcaccagacaccaaatctactggtgccttgatcttggacttcccagcctccagaactgtaagccataaatttcctttgtttataaattacacagtctaagacattttgttatagcagcccaaacagattaaggcggggcgttaggaccttaacatatgagcgtgaggggtaggagagggaaacatttcaactcatcacacatgccaagccatattgcatcctgaggccaaaggaaaaatctgaaatactgatcttgcttttattgagaaagttgatatttttgctcatcatggatttttgcattgatttttatttctgaaattattgtactaaaatgttatttaccttgatctctgaatttgttggtactcttagagtttgtgcctaacgtaagcacctcccctacctcaccccagtcctggcccagtctggcttgcttcatgattttcaaagtccgcaacaagtggcttccccaccacatgtgcaaattctccctccacccttggatgggatttgtttaggcccagaaagtttaaaggagctgtggtgttttgttttgttttgttttgttttgttttgttttgttttaatctgcctctgcctaggtcactggcttcatttcctccttcattgaggctgttcttcctgccttctttgaagacttttgcttttttccccagctttgttgagatataattgacaaataaaaaatggtgtacatttgctatagtttggatgtttgtgtccccaaacctcatgttaaaaattttattattatcattattagtttacagacagggttttgctctgttccccaggctagagtgcagttgtgcagtcatagctcactaaagtctcaaactcctggttataagtgatgctcctgcttcagcctgctgaatagctgggactaccgacatgcactaccatacctggctagttgtttgtttttgtgtgtgtgtgttttgtttgtttttgtataaacaaggtctcactctgttgcccaggctggtcttgaattcctggccccaagtgatcccacctcactttcaaaagtgtggggattacaggcatgagccaccgcacctggcctcatgttgaaattttatccccaatattggaggtggggcctgatgggaggtgttttggtcatgggagcagagtggatccctcgtgaatggcttggtggctttctcatagtaacgagtgagtgacttctcactctattagctccagcaagagctgattactaaaaggagccctggccgagtgcggtggctcacacctgtaatcccagcactttgggaggccaaggtaggtagatcacctgaggtcaggagttagagaccagactgaccaataaggtgaaatcctgtctctactaaaaatacaaaaattagccgggcatggtggtgggtgcctgttatcccagctactagagagactgaggcaggagaatcacttgaaccggggaggtggaggttgcagcgagctgagatcgcaccactgcactccagcctgggagacagaacgagactctgtctcaggaaaaaaaaaaaaaaaaagagccccgcacatctccctgccctctcttgcttcctctctcaccatggatctccacacactgggtccccctttcccttccactatgagtagaagcagcctgaggttctcatcagaagcagatgctggtgccatgcttctggtacagcttgcagaactatgaccaataagcctgttttccatttgtgtacccaaggagtacctgaagctgggtactcttttatagcaacacaaatggactaagataatatttcaggtgtacaacatgatctttgataatgtgtgtacatcgaaaaatgattaccactatcaagcgaattaatacatccatcacctcatctggttaccatttagtctgtgtgtggtgagaacatttaagatatatccttttagcaaatttcaagtagacaggctgggtgtggcagctcacgtctgtaatcccagcactttgggaggctgaggcaggtggattacttgaggccaggagtttgaaaccagtctggccaacatggtgaaactccgtttctactaaaaatacaaaaaaaaaaaaagagccgggcatggtggtgggcacctgtaatcccagctactcaggaggctgaggcaggagaattgtttgaacacaggaggcggaggttgcagtgagccaagatcataccacggcactccagcctaggtgacacagcaagactccatctcaaaacaaaacaaaacaaaacaaatcaagtagacaatacagtattcttaactatagtcatcatgctgtacattaactccccagaacttactcatcttgcctaactcaaagcttgcactgcttgactgacatttctgcatttcttccctgcccccagtcccgggtaaccatcattctactctctgcctctgtgagtttgacttttttagattccgcatgtaagtgagatcctgcagtatttgtctatgtgtagtttatttcacttaacataatgtccttcaggttcattcatgttgctgcaaattacaggatttccttcctttttttttttttttttttttttttttttagtaggatctcgccctgtcacccaggctggagtgcagtggcgcaatcatagctcactatatgaactcctgggctcaagcactcaggcgatccttctgcctctaactcctgagtagctggaattataggcgggagccatcattcccgactattctgtgattctatttgaataattcaggctaggcgcaatggtatacgcctgtaatactatcactttgggtggccgaggcaggaggatcacttgaggccaggagtttgagaccttcctgggcaacatagtgagaccctgtctctacaaaaaaattttaaaatagccaggcatcgtggtgtgcatctgtagtcccagctacctggaaggctgaggctggaggatcacttgagcagaagtttgaagtaagctatgatcacaccactgcactccagcctagatgacagagtgggaccctgtctctaaatgataataataataatggcccgggtgcggtggctcacacctgtaatcccagcactttgggaagctgagacaggtggatcacctgaggccaggagttagagaccagtctggtcaatatgatgaatccctgtctctattaaaaatacaaaaattagctgggtgtagtgacgaatgcctgtaatcccagctactcaggaggctgaggcataagaatcacttgagcccaggaagctaaggttgcagtgagccaagatcgtgccactgcactccagcctgggcaacagaataagactctgcctcaaaaaaataaaaataaataataataaaagaaaagaggccgggcgcggtggctcacacctgtaatcccagcactttgggaggccaaggcgggcggatcatgaagtcaggagatcgagaccatcctggctaacatggtgaaaccctgtctgtactaaaaatacaaaaaattagctgggtgtggtggcaggcaactgtagtcccagctactcgggaggctgaggcaggagaatggcgtgaacctggaaagtggagcttgcagtgagctgagattgcaccactgcactccagcctgggtgacagagcgagactctgcctcaaaaaaaaaaaagaaaagaaaagaatgattcagtcctgcctggatcattctgctcaccttccatgggcttcctgtcccatgtagatggccaccatcttgctaagaactagggaaggtagagtgagagctggagaagagggaatcgatccagtattagaagaaccatccaatgaggttattttggaaagagctattttaacctgctacccactttgatacacatggaaaatatctcaaactacagggaagatctgaacgtgacagatctcataatcagtgagagggataaataggaagtactttcatagcactcactatatacctgacacatcacatttattagctaaccttatgagattgatatgattgcgatccctttttctttttctttttttcttttttttttttgagatggagtctcgctctattgcccaggctggagtacggtgatgtgatcttggctcactgcaacctctgcctcccgggttcaagtgattcttctgcctcaacctcccaagtagctgggagtacaggtgcacaccaccacacccagctaatttttgtatttttagtagagacggggtttcaccatattggccaggctggtcttgaactcctgaccttgtgatccgcccgcctcagcctcccaaactgctgggattacaggtatcagccactgcacccggctgattgctctcccattttacaggtgaggaaactgaggcccagagaggtgaagtgactcttccaagaccacacagctagtgagtgtggcagagccaggatttgaacccaggccatttgaccctctctcccttctttgacctgctctgctatagctgcctctattactagtattgctataataatattatttattattctaataatcataataatattaaccaccatggatattgaacacaaatcattatttgattgtagcacctatccagccctgcatgatctggagagactttatttactgtgcatcagacactggtctgatttccatctggggtgatgaaactgttttggaactagaggtgatggttgcacaacatcataaatatactaaatgccactgaattgtttgctttaatatggttaactgcatgttatgtgaattttacatctttttaaaaattctaaatcaatagccaggcatgggggtgagggcctataaatcccagctacttgggaggctgaggtggaaggatcacttgagcccagagttttgaggctgcagtgagctatgattgcaccactgcactgcagcctgggcgacacagagagactccgtctctacaaaaaaaaaatttttttttttgagacagagtcttgctctgtcgcccaggctggagtgcagtggcacgatctcgactcactgcaagctccgcctcccaggttcatgccattctcctgcctcagcctccagagtagctgggactacaggctcccgccaccacgcctggctaatttttttgtatttttattagtgacggggtttcaccacgttagccaggatggtctcaatctcctgacctcgtaatctgcccgcctcagcacccccaaagtgctgggattacaggtgtgagccaccacgcccggccaaaaaaaatttttaaattagctagacatggtggtatacacctgaattcccagctacttggaaggctgaggcaggaggattccttgagcccaggagttcaaggctgccgtgagctatgatggcaccactgcactccaacctgggtgtcaaagcaagaccatctctaaaaaaaaaaaaaaaaaaaattgaaatcaaatcatgttactcccctgcttcaaacctcctatggctccccattgcacttagaaaaaacaagcacacatatattcattgcagcagtattcatgatagcaaagatatggaatcaacccaaatgttcatcaataacagactggaaaaagaaaatgtggtacatacacaccatagaataccatgcagccataaaaacgaatgagatcatgtcctttgcagggacatggatggagctggaagccattatcattatcctcagcaaactaaaacaggaacagaagatcaaacaccacatattctcacttataagtgggagctgaacaatgagaacacatggacacagagaggggaagagcacacgctggagcctgtcatcggtgggaggaggagagagagcatcaggataaatagctaatgcatgctgggcttagtacctaggtgatgggttgataggcacagccaaccaccgtggcacacgtttacctatgtagcaaacctgcatgtcctgcacttgtatcccagaacttaaaataaaattaaatttaaaagaaaaagaaaaaatgacccagcctctccatgctggtctacaggagtctacataatctgactcctaccaacagcatcttctacttctctcccccaactcatcccattccatcctcaccagcctctcttctgctcctaaaacatatcagggtcatcgctgcctcaggacctttgcactttctgttccctcagcccgcaacacctatccttgcatcctcagtggctgcctccttctccccattcaggcatcactgccatctcttgagagaccttctctacccaactgctcacccctccttagcccatctcataatgacccctgaaaacatctctcttcaaaataatctgaaatgatgtgcttacttttgggcttaatcatttattatctgtctttcctgtgaaaatgtaaattccggccaggtgtgttggctcacacctgtaatcccagcactttgggaggctgatgtgggcagattgcttgaactcagaagttcgagaccagtccgggcaacatggcgaaaccccatctctactaaaaatacaaaaattagccaggtgcgatggcacgtgcctgtagtcctagctatttggaagggtgaggcaggaggatggcttgaggctgggaggtcaaggctgcagtgagctgtgattgcaccactgcactccagcctgggtgacagagcgagaccctgtctcaaaagaaaaagaaaaagaaaaaaaaaagcaaatgtaaattccacattgatattatccaccaccagactccaggccttagcatgttgtaggaattcaacaaatgcatcaactctacctcattagcaccttcagtttctcttggttcaatggccagtggctcccgggagtaaaggcatgggattccaaaaagaaatgtaaacatgttaatattataggtcctgtattatccagccatttctacatcccgatgagaagctactggtccccagccagatccctctgacccagctgggggtctgtcccaggctactgtgagttgggctgtttttttgattttggggttttgttttgtttttgtttttaagagataggatcttgctctgttgcccaggctggagtgcagtggcgcaaacacggcccactctgccttgacctcctggactcaagtgatcctcctgcctcagcctcccgattagctgggattacaggtgcatgccaccacacccggctaatgtttttttatttaattttttgaagaaatctgggtcttgctatgttgcccaggctggtctcaaattcctggcgtcaagtgatcctcccacctcggcctccgaaagtgctgggattataggcatgagccacgatgcccagttgagttcttagtggctcccagacatccccttagctgatgggcgttacgtcaccatgagatgcctgggttagacccatgacccctcttccgggaggcggccactgcctgtagctggctgagcctggggtttaagagcccagacccagacgggtacggtggctcacacctgtaatcccagcagtttgggaggccgaggcgggcggatcacgaagtcaagagatcaagaccaccctggccagcatggtgaaaccccgtctctactaaaaatacaaaaattggctgggcgtggtggcgcatgcctgtagttccagctattccagctactctggaggctgaggcaggagaaacatttgaacctgggaggcagaggttgcagtcagccaaaatcactccattgcattccagcctgggcgacagagagagactctgtctcaaaaaaaaaaaaaaaaaaaaaaaaaagagcccagaccccttgctcatataccctggtgggtagatcaccctgaggtgaatcaatgagctcctcaccatccggaacctcccccaggatcaggtggaggctgaacttgggctgaaccgcatccttgatcagcttcttcctctgccctgtgctgcttttctcattctccttagaccaccgattctcaaactggaaacactcccagaggtcctgacttaattggtaaggcacgaggcccagccacacggatttttaaaaatctccccaggcaattataaagtgcagccaacttagagaagcactgcctcagaggtctctcctgagaacaccccctttgtaagctccttacccaagaatcgccagcgtgggctcctcttccaggaaatctgacctaacgcacttgctgtccactgaaagcgcctactagcagctaggacccaatgccgggggtgcaggaattcctcttccaggcccagagcccagcccacagccagggtggccttctggtcatgcagatggagcagcaagaacgggggtgggcaaaagggggcgatgagagaaagcatgtgtgagagagaaaggcgggggcaggagggagagagagacagggggacagacagagacccaaagagagagacagagagagacacaaagacagagagacccaaagccatatggagagatacagagagagaatggctgggtgcagtggctcatgtaatccctgcattttgggaggccgaggcgggcagatcacttgaggtcaggagttcgagaccagcctggccaacatgacgaaaccccgtctctactaaaaattcaaaaattatccaggcgtggtggcgcatgcctataatcccagctactcgggaggctgaggcaggagaattgcttgaacccgggaggcagaggttgcagtgagcagagatcatgccactgcactccagcctggctgacaaagcaagaccctgtctcaaaaaaaaaaaaaaaaaaaaaaagaaagaaagaaagaaaaagaaaagaaaaaagaaagatacagagagagacccaaagagagacagacagagagacccagagacagagagagacagagaaaataagagaaagagacagagagatccagagacagagaaagagcaacacacacacacacacacagacacacacacacacacacacacacactggtgcagggaggctgttggaggaagagagaacaaaagagagagagggtgatgcaaagacagagatagagatccaaagggagagagagaaaggggcagaaataaaaagacagagacccaaagaaagagaaagaaagaaagaaagaaagagacccaaagagaaagacagagagaccgagggaaaacagaattcagatagagagaaacagagacagatgagagaggaataggaagccccttctctctctctctctctctctctttctctgtctctctctcagatggagtctcactctgtcacccaggctggagtgcgtgacttgatctgtagttccagctacttggaaggatcagtcttggctcactgcaacctctacctcccaggttcaagtgattctcgtgcctcagcctcctgagtagctgggattacaggtgcccaccaccacgcctggctaattttttgtattttagtagagacagggtttcaccaaatcgcccaggccggtctcgaactcctgacctcaaacgagcctcccgccttggcctcccaaagtgctgggattacaggcatgaaccaccgctcccagccctgggcagccccttctattcagtccttcgccctcggttggcatggcatctctgctcctcgccccacttggaatacccagagaccactggccggggagaaggagaagagcatccaggaaggctcttggccaccttatctgacactgccaaggtagctcctccccagggctccttgagccgctcaccagcttcagtttgttaaatttagctcagattcctttgctctgagtaaattgcgtctttgcaaaggagcagaagaggactaaacctgtttacagtgtttgaaacccactcactaaaatattttgcaacgatcacaataatgactctgatttccatgccggccgcctctcaggagctggggttggtgcagggaccaagggtgccgcctggcgtggcatgtgaacaactgcacgctgagctcaggcaaacctgggttcaatcccagctctccaactgacctgccggggggcctttacacgtggcttttaatgcatcccataaatggtatatcagtgattccccatctcaccggctttctgtaaaaagattaagtgaaatgctggaggctgagccactacaactggcaaaatttaagaggacaataggttggtggttacagggcacaagatccagagtcaagctgcctgggttcaaatgccacttgtaccccatatgacctaggacaagttacctagtccctccgtgcctgagtttcctcgtctgctaaatggggataatgctaatggctaactcataggcttcttgctccattcttgattgttttcctacttatcttttggtttcagctcatgagtcccttagaaagctattgctaggctggcgacggtggctcccgcctgtgatcccagcactttgggaggccaaggtgggcagatcacttgaggtcatgagttcgagaccaggcctggccaacatggtgagaccctcccccccatctctaccaaaaacacaaaaattagctgggtatggtggcgcacacctataatcccagctactcgagagactgaggcaggagaatcgcttgaacccgggaggtggaggctgcagtgagctgaatttgcaccactgctctccagcctgggcaacagaatgagactctgtctcaagaaagaaaagggaagggaaggggaggggaggggaggggaggggaggagaaagaaagctgttgctaatccatcagttatacctctcttaaagcatttacctcattgggacagtctatggcaatgattttgaattcattgagggcactgactataatgtattcatccatatatgcctgatggataacacaggagctgatccacatcaacccctctgacttcatttcccatcactcccacctcactcaccttgtcccaaccaacaccagctgtcttgctgatactcaaaacacaccaggcacattcctgcctcagggcctttgcacttgctgttctctctgcttggaacttcctttcccaagaactttgcatggctggctcatcctcttcattaagcactcaattcaaatatcagttcaccagatgaaccacccctaaccaccttttcttaggttctcctgtttcagtcacgttttaccccatcgcagtgttattgtcaatctcactgcctcaaattattgtattatctatttactagtatattatctgttttcccttataaaatttaaactccatgagtgtaaagtccttgtctgatttgttctctgcctccaaagtgttcagtgataagttggtgaggtgatgggtatgttaattagcttgattgaatctttccataatgtacacataggttgaaatatcacattgtagcccatgaatatatacaattgttgtttgtcaattaaagtcatttttaaagctgcttgatgaatctctgttgaatgattaatgaatgaacctcatccacttccatcccttctataactatgtctatgtagcacttactgtgtgccaagcactgttctaagtaatttgcatgtattaattaatttgatgctaacaatctctctgagaggtaggtgatgcaattatcatccccatttcatagttgaaaaaaactgaggcacaagatgttggtccagtaactggtatacaagccaatgaaatctggatttggtatcagaagtggggtgccgttaaatgcactaagattacaaagctggtaagacgttgggccaggatttgaagccaggcactgtggctcctgagcctacaggcttagtcactctgttcaatttctcacagttccccaaacactatttctacccacttttagtctcttctgctctgttccccaatttcttatagcctcctaggcaactccactttgactctccccaaactagaaatctcagatttccctttgaactcacctgttctttcacttcctagatgaagtggtacttaacttgtttataattcagggagcctgtaaatttggttgggaaaattcgcatattcattacagcctctagctgtaattatgcatggaggcaacaaattgcagcaatattagcagtgttcatgacacctgtgactttgtcatcaacagaaaccacatctcagctgggggcagtagctcacgcctgtaatcccagcattttggaaggccaaggcaggtggatcacttgagctcaggagtttgagactggcctggggaacgtggtgaaacccccatctctacaaaaaaatacaaaaattagctgggcatggtggtgcacacctgtagacccacctactcagggggctgaggttggaggatcacttgcacctgggaggtagaggctgccatgagctgtgatctcaccactgcacctgggaggtagaggctgccgtgagctgtgatctcatcactgcactccagcctgggcaacagagtgactctctctcaaaacaaacaaccaaccaaaaaacagaaaccacatttttattatgtcacattgtaattattgcagatatcttgaaactcacttactctcatgactaccttgaagttgttaggtctgttactagctcttgttatttatgcattatgaaagaaacacattagtgatgtatgacaaatctgttctttcaaatatttttataactaatgttcaatgtaattgatttcctctgcatttgatattatgcacttaaaaagcacaattctgagaagagatcccttggcttttgtcaaactgaagagagctccacggctcagaaaatgttaagaatcttcacgccagccaattagcaagtgaatcctattgattctccttctaaagtgtttcttagatcctctccccacctttattcccaacactgctgtcctagttcagctatctcctgactcactggcattgcccccctccacacctccctcttgctcatcttcccctcccagttttaaaaatctatgacaaaattaataactagtatttacactgagttttagggtttacagcagatgttacaaactcagagctcacaaattacttccttgatctatccacatcttaagataaaaatatgttcagaacaagtcaggagattacatataaaagtgaaatttttgctttttctcaaaaactcagacgatttacccgagctgagcctacattcctgcatgacagcaatcagcttctattgaataatggttatatccttcagatgagcctggagctatctagtttgccaaagacctcaccactctctaatgtctccctgacatggaagctgccccagtcaccattacccacttggcccctgtagacaattgagtttagcaaccctggatttcaaagtaccttatttgatccttataaaagccctgcagagtgtgtatggtacagattcttatcctgttttacagatgatgcaactgaaaactcatgaaagttaaataaaacacagggtcacgtaagagtagaaagagctggcatttttctctccagactctgtacttcccactgacctggactcttttcagaaattactttgtaaaacaccattatgatgtgttgaagtgcatggtctcccatcaaaagacctccgatgctactcaggaggctgaggtgggaggatctcttgagtctaggagttcaagaccagccttggcaacatagtgagaccccgtcgctcaaaaaataaaataaaataattagccaggcatagtggtgtgcacctgtagtcccagctacttgggaggctgaggtgggaggattacttgagcccaggagttccaagctgcaatgagccatacacgattgcaccactgcactccagccaatggtggacagacctccaatagcctggtcaatgaaaatgggataaatcccaagcttcccaaggtgatatctgagctccttcaaacctggcagcctcccttgcagcttctgctttcaagtttgacacgccccttctttaaagtcagacttttgaatgttcaattatgcaaagccaccatgctataaggaagctcaagctagccacatggagagaaagaatatactgaaaaagctcatgtttggtgcaaacatgtgagtgaaacctcatggactgtccagccctgccagccatcaacataacgcagctaaatgagagactgcattatgttgagattacagcagaaccacactcctgagtttgcaaacccaccttcttatctatttgagatactcacgtgctcagacacaaaaactaaagataaagacgtgagtaagtagatcaaacacactgcagggaaggttaaaatatgtagctaccagtaggaggcactatccccagagcactgattgtcaggaggcatgggaggacccaggaagggacttgggtgggtgggggagctcactaggggcctccaggcaacagctatttactaactggtgtggaaatattttaatattttaacaatcagctgtgccaatgtgtctcagctgaatatctgccctgaatacacagaaaggagattattgaagccaaaagaataagaatccaagccgtgaatcatactgcaatcattccgccttggcttagaaatggattagacaccatcatgttttttcattccccagtggattttaaatttccaagttggtataaacctgggggcctctgctgagtgtatcataagtaaagtggaacgtgatgactcgcacactggctagaatcgcctgggaactttatttttattttatttgtatagcagcagagtcttgctctgttgcccaggctgaagggcagtggcatgatcataattcactgcagtcttgacctcctgggctcaagcaatcctcttgcctcaacctcccgagtagctgggactacaggtgcatgccaccatgcctggctaaattttaaacaaaatttttcgtagagatgggatcttgctatattgcccaggctggtctcaaactcctggcctaaagccaggagccaggcctcccaaaagcactgggattgcaggcatgagctaccatgcccagcctaccaggtaacttgaaaagtgctaatgccaggaccctacatccagagttggatttaatggagtagggcctggacatcatgatttttaaaacagcccagatgattgtgcagccaaggttgggaaccactgatgtaaagccatgcttcttaaaatgcggtccacaaaccagcagcagcagcatcacctaggagcttggagaaatgcagagtctcaggctctgctgggacctactgaatcagcaaccccaaggtgaacccagaaatatctgtgttttcacaagcccgaaggggggggctgatgtgtgctcaaggaccagagagctggcagaatgaaagatccactacctgtttctcttgcaagaccgccatgccacatggacgcaaggtcaatgaaaaccctccaaaactccactgtgccatgaacatgctggggtctccaagtccagcacacaggctaatctggggctggagactttgttttttgtttttgttttgagatggggatctcactctgtcacgcaggctggagtgcagtgctatgatcacagctcactgcagccttgaactcacaggctcaagcgatcctcccaccttcccaccttagcctcccgagtagctaggaccacaggcacgcaccaccacgcctggctaattttttttttctttttttctgtacagatgggggtctcactatgttgcccaggctggtctcaaactcctggcctcaagcagtcctcccacctcggcctcccaaagtgctgagattacaggcatgagccactgtgcctggccatgggctggagattttggacacagatctcaggagactgaaccagactctggaaaattggctgtgcttgtgggagccaaccaagggaacatttaaggtacgcctgagaggtcccaccaaagggggaaagaaaatgggtgaaaatgagtcctaccctctgcaattgagaagcccaaggagctctccaacgggctgcacctgctcctgctttagggagcctcttttttttttttttctcgctctgttgcccaggctggggtgcaatggcacgatctcggctcactgcaatctccacctcctaggttcaagcaattctcctgcctcagcctcccgagtagctgggatcacaggtgcccgccaccacgcccggccaattttttgtatttttagtagagaaagggtttcactgtgttagccaggatggtctcaatctcctgaccatgtgatcctgccaccttggcctcccaaagtgttgggattacaggcgtgagccaccgtgccccgccaagcgaacctttttaaatggggacatcctcattctaaggcaagcactgaagagttccagaatgttcccgcaggcccacccgcaggaccaatgcacggactccgtgccactttgtgatggattgtagtcatgcgtgtctactgaaaagccttacatattgtgccttgggtgctgccctgtgttccgaagcttgcttctagggcctgtgcactcagccgtgaacatttaaatggcagctttgagacaaggcctcagctgttctctggtccagacataagaagccagagctttgaaaatggacccagttcggccaggtgcagtggctcacacctgtaatctcagcactttgggatgccgaggcaggcagatcacctgaagtcaggagtttgagaccagcctggccaacatggtgaaaccgcacctctactaaaaaataaaaattaaaaaattagccaggtgtggtgggcaggtgcctgtaatcccagctactcaggaggctgaggcatgggaatcacttgaacccagaggttgcagtgagccgagaagtgcaccactacacttcagcctgggggatacagtgagaatctgtctcaaaaaaaaaagaaacaaagaaacaaagaaaatggacccagttaaacttgtatgaatttgagaaagttttttttaaccattctgggccctagtttcctaatttaaaaaagggaagaggtgagccagacactgtggctcattcctataatcccagctacttaggaggctgaggcaggaggattgctaaaggccaggagtttgaggccagcctggacaacatagaaagacccctgtctccacaaaaaaaaatttaattagctagtgtggtggtgtccacctgtagtctcagctactcagaaggctgaggcaggaggatcacccgagcccaggagttcaaggctgcagtgagctatgattgcaccactgcactccagcctgggcaacagagcgagaccctgtctctttatttatttggttttttttttttttgagacagagtctcgctctgttgcccaggctggagtgcagtggtgcagtcttgactcactgcaacctctgcctcctgggttcaagggattctcctgctgtagcctcccgagtagctgggattacaggtgtgcaccaccatgcccagctaatttttttgttgtttttagtagagatggggtttcaccatgttggctggtctggtctcaaactcctgacctcaagttatccacctgcctcggcctcccaaagtgctgggattacaggtgtgagccaccacgcccggccccctatctatttaaagaaaaaaagagaagaagaaggaatttgcacatatatcctatatatttgcacaaataaaaaaataaaaattaaattaaaaggagggaggagtaattaaagatatgattttccaagattgtcctaaaaataaaaaagagagtatgagtgcctatggcactgattggcatgtggacaggataacgtgcttcataaatgttaataagaaaaataaataggccttcctatttgagacttaagggcgtttgatatcaccatctctccagaaaggaccatctgaaacatcctctcttagttcccattaacctctcactgtgatttatagcagaagttagcagtcaacgtcctgcaggccagatacagcccactatctggttctttacagaagtctgcaaatcctagatttagaggtcagattttcatctctcagccacaaacacattccaacctcatatcttgctttcacccagcctttactaaccacctgctatatgctaggctctggtgaaacataaccaataagataaagtccatgcccttttggaggtcacacctcggagtatgggtgggaatttgttcatttcacttaatttaacaggcctaaccaggtgcagtggctcatgcctgtaatctcagcactttggggggccaaaggtaggcagattgcttgaggtcaggagtttgagaccaacctggccaatatggtgaaaccctgtctctactaaaaatacaaaaattagccagacatagtggtggatgcctgtaatcctagctactctggaggctgaggcaggagaatggcttgaacccaggagtggaggctgcagtgagccaggatcgcatcgctgcactccagcctgggcaatagagtgagactcctttcaaaataataataataattattattattattattatttaactggccattcctgcttataatgtgagatgcactgtcctaagcatttttcaaatgcttaattcttgtaatgaccctatgaagtgactgctatttttttcctgcattttgcaggcaaggaaacagaggctcagagaggtgaagtcacttgtccaaggtcacacagcaaatagttagaaccagggtgtgaatccagccagactagctccagagccaataagctccacagtctccttattcagaagcccttgacctagcatacagatggaggcactacacataaatattgaccaggcggtgcccagaccacagaaggaaaaaaaaagaaagtgacttatccttcaagacactgttatttgaacctggccttgtcagtgctctctcccagactttctgcactaggaactgttgttatcttccttcagtgctcagagaggctgtggcagttgcccagggtcgcccagctctaacaggatgagctgggattttcaaggtggctccttttgtccccagatctgtcttttgcaacatatgtggggccctccagaggaatttcaccaggcaagaatggccttcttggatggcaaaggaatacatttgatttgcaacgtggcatttcagagagatagtgggattggggttttgttattgtagctctttgttttttgctttttggtgttttttgaggagtctcgctctgtcacccaggctggagtgcagtggtgtgaccttggctcactgcaacctctgccttctgggttcaagcaattctcctacctcagcctctcgagtagctgggactacagatgtgtgccaccaccacgcctggctaatttttgttgtttgttttctgtttttttgtttgcgtgtttgttttttgtttgtttgtttttgtttttttgtattttttagtagagacaagttttcaccaaattggccaggctggtctcaaactcctgacctcagatgatctgccctcctcggcctcccaaaatgctggggataatgggattgttttttaagttcattgtcaccattagattttgacccagcactcatctctatgtggacttggccttcatttcttcaattgtgatctgagcattacaagacctgccctcccaaatgtcgttttcatggttgcaagagacagaggaggtgaaaggactgtgagaatttggaaatatcagaaggtgaggtcttattttattttaatcccagttcggtctctttcaagctggttctagtggccaggacttagagaatgggttgtatgtgccatgctggccttcaggattgtatagatttcatcctaagtttgtttgagacttcacacaaccaagtttgacagacatcacgtgctttctacctgcaaagctctgtgcagagcactcccatagcttcaagggtcaaataagaaaagggacttgcctttgtagagtttaggacttgaagggcagggaaaaggttaatgatcacaatttcattcattctccctttcattcattcagtcgtcctttcattcattcgttcattcgactctatgccaggcatttccaagttcaagaccttgaaaaggcaggagttaagaacatgggctctggattctgacagacctgggttccaaagctggttctaacttattggcttcattatttaacccctctgtgcctcggttgcctcctctgtaaaatgggtactggggttagtaacccatgagctcatacccaaagccccttggcctagggctgggcccatggcgggtgtggaataaatgggaactggtctctgtgtagctcatagacattgtacagctgctgtttgcatgtctgcctcctcctccaggcaggcccccttgagtacagtgcataaatgtggaaccagaagatcccctgggcagagaatggaaaagaaaatagggttcacttgctctaagaggctttcaggtctcaaagccagagccacgaagaggtgatccacatagatgttcaagttcacaggggtccatcagttattcactcaacaaacattggtatctattatactctaggcacttttctaagcactagagacacggtagcagaaaagacagaccagaaacaaacagacaaacctgcccttgtggaactgacaatccaatttagaaagaaacacgtaattttatataatgagcagaatggctctgcaaaatgaacagtcgccccaggagaggggctctacaggagaaggtgacatttgtgctgagaccacagtgtgtgaaggagccagccatgggaagaacattccaggcaggaggaacagcaagtgcaaaggccttgaaaatgcaggggacagaaggaaagccaccgggactcaaccaaagtgagggcaataatgatggaatcatgggcagagagtcatgggcagagccctgcaccaaggttcaagcagttaagggagcctggagtgtggacagacgccatcaaaagaaccctgaaggccgggcgcggtggctcacgcctgtaatcccagcactttgagaggccaaggcaggtggaccatttgaggtcaggagttcgagaccagcctggccaacatggtgaaacctcgtctctaccaaaaatataaaaattaaccaggcgtgatgacgtgtgcctgtgatcccagctacctgggaggccgaggcaggagaatcacttgaacctgggaggcagaggttgcagtgagccaagatcgccccactgcactccagcttaggtgactgagtgagactctatctcaacaacaacaacaacaaaaataaccctgaggtgttgaaaagatagaattttggagtgacggtgacagaataaaagacaaggatcagtttgggcacagtggctcgtgcctgtaattccagggactctaaaagctgaaggagaggcatcacttgagcttaggagtttgagatcagcctgggcaacatagcaagattcaatctctacaaaaaataaagtaaaatataatagccaggtgtggtgccacatgtctgtaatcttagttacttgggagactgagttgggaggactgcttgaacctgagagtttaagagtacagtgagctatgattgtaccactgcactcctgcgtgggtgacagagtgagaccctgtcaaagaagaagaggaagagaaagaggtagaagaagaggaggaagtggaagaggaggaaagacagggatcagcggtaggcaagcagaagtatgcagaccccacaagaagaaaagagggccaggcgtggtggctcaggtctgtaatcccagcactttgggaggctgaggcaggcggatcacctgaggtcgggagttcaagaccagcctgaccaacatggagaaaccccgtctctactaaaaatacaaaattagccaggcgtggtggtgcatgcctgtaatcccatctactcaggagcttgaggcaggagaattgcttgaacctgggagacagaggttgtggtgagccaagatcacaacattgccctatagcctgggcaacaagagcaaaactctgtctcaaaaaaagaagaagaaaacgaagacaggaggccggacgcagtggctcacacttgtaaccccagcactttgggaggccgaggtgggtggatcacctgaggtcaggagtttgagaccagcctggccaacatggtgaaatccagtctctactaaaaatacaaaaattagctgggcgtggtggtgtgcacctgtaatcccagctactcgggaggctgaggcaggagaatcgcttgaacctgggaagcggaggttgcagtgagctgagatcgcgccaccgtactccagcctgggtgacagagtgagactctgtatcaaaaataaataaataaataaataaataaataaataaataaataaggcatagttgttcccaggattggaaacccaaggtacagataaattctagatggaaaagtcacattgaacagagaggataatttggcagtgggggtggtgggggatatttgttcataagctgcttgggtttcaaggaccagcatggagaatctgatagaccaaaagagataggggagccccatctctggggggccctacccagaccttccatggctgccaaagctgctaattcaaagaacaaaagaagggtctctctgcaccaaaagtcagccagctgcactgaaaaagaagctccctgggaccagacctattttttttaaatatcaactaggctagaattggccagcctgcctcccttaagaaaagaaagaaagaggccgggcgcagtggctcacgcctataatcccagcacttcgggaggccgaggcaggtggatgatttgaggtcatgagtttgagacaagcctggccaacatgctaaagcctcatctctactaaaaatacaaaaattagccaggcatggcagctaatcacagtgggtccctgtaatcctagctacttgggaggctgaggtgagaatcacttgaacctgggaggcggaggttgcagtgagctgagatcatgccactgcactccagcctggacaacagagcaagactcctgctcaaaaaaataagtaaataaaaagaagaagaagagaaagagagctctgatttctaagtaggttcttttttaaaggttaggttgcagtttaattgtgatgtctaaacaaaacaacctgcttttctttctttttttttttttttttccaagacagggtctcactctgtcacccaggctggagtgcagtggtgtgatcatcactcactgcagccttgaactcctgggctcaagcaatcctcccatctcaccctcccgagtagctgggactacagttgggcaccactacacctggctaattttttttttttttttaattacgtgagcatttttcgtagagacgaggtctccctatgttgcacaggctgaccttgaattccggggctcaatcgatcctcccacctcagcctcccaaagtgctgggattacaggcgtgagccaccgtgcccagcctcttttttttttttttaactgtgtaaactgaggcctcaaaatgcttaatggcatacccgctacagaaacagaaaactattaccaagtacttactatgtggctgcactgttctaaatgctttctatgtaataatgcagtgaacttaatctttgtaagagccccagagatgggtgctattgttttccccatttgacagagagggaaactgaggcaccgaaagggaaaggaaccctcctccccagaatcagtcagcaagtggcagagttgggatttgaaccctggccggggcactcaaccacaccccagattgaagccaggtaagccccacacttgacctcaggacctgcttgtaacccatcagacctcagggagccctgcaaagccccgagtccgcccctgccgccccagttggtctttaccaagccctttgtgcatgaaaaagcaatagccatatatgtaatgattagttatcacatgatgggaattcaattattgatttggggctgacttccatttctcggaacaggcagaaaggaagcggcagggaggtgggtactccggagagcgagctgagcgctctgctgcccggcgcctgccaggctggggagccatggcgccacctggtggccagtcttagcagcggcgggcgacagtgggtgaacgcaggggagacccgcgcaggctgctttttgagcacagtgtgtgtcaggcgctgttccagctcaggggtccaaaaacctcttcgataaaggacctcagatgaaatgcttccggctctgagggctagacagtctctgtcccagagacagctctgccgttgtaacacaaaaggagccacagacaacatcagcacaaatagaaaaggctgtgttccaataaaactttatggacaccaaattttgaacggcatacaactttcacctatcaagaattatccttctttttattatacgacaacaaaaattaatgaacgggtcgggcgtggtagctcacgcctgtaatcccagcattttgggaggccaaggtaggtggataacctgaggtcaggagttcgagaccaacctggccaacatggtaaatgaaaccccgtctctactaaaaaatacaaaaattagctgggcgtggtggcgcgcacctgtagtcccagctactccggaggctgaggcaggagaatcgcttgaacccgggaggctgaggttgcagtgagccgagatctcgcccctgcacaccagcctgggtgacaccagaccggcccacgtggagctcacagagcaaatatggcagcaacaagggagaaagccgatgcgtaacacatatgagctggtcgtgagtgctagtggggaaaattaagcggggcagggaaccaacataagtaggggttgcattttattttttttcaattctatttatttatttagagataggatctctctctgttgcccaggctggagtgcagtggtgcaatcatagctcattgcaaccttcaactcccaggctcaagcagtcctcccacctcagcctcctgagtagctgggactacaggtacgcatcaccatgcccagctaatttttgtaaagatggaatcttgccatgctgtccaggatggtctcaaactcctgggctcacaggatcctcctgccttggcctcctgagtagctaggactacaggtcccagtacagtcaacgagggaggaagccccatatgtaacacataggatctggttatgagtgctagtggggaaaattaagcggggcagggaataagcacgagtagggctgcattttattttatttttatcttatttatttatttatttatttatgagacagggtctcactctgttgcccaggctggagtgcggtggcacgatcatggctcactgcagccttgacctcccaggatcaaaggatcctcccacctcagcctcccaagtagctgggaccacaggcgcacaccaccatgcctggctaatatttttttgttttttgtggagatgcctcactatgttgcccaggctggtctcaaactcttggcctcaagtgatcctcccgccttggcctcccaaagtgctaggattataggcatgagacactgcacccagccggggctgcattttaaatagggtgatgatgaaaagtttgatgaggaggaaacctttaatcaaaggctggaaggaggcaaggaagaagccgtgtgggtgccgaggagaagagcattcctagcagaaggaacagccagtgcaaaggccctgaggctggaccaccctggtgcattggaggaacagtgataaggttagtatggctgcagcacagtgcacgagggagagagaggagggaggtgagggcagggaggtgacaggggcagggccttatgggtcttggtgaggactttggcttttgctatgagtcaggtgggagccatggagggttctgagcagaggagggatataatctgacttgtgttaaaatatgatctctctggggggctgagcatggttgctaacacctatgatctcaatgctttgggaggccgaggcaggaggatcacttgaggccaggagtttgagaccagcctgggcaacatagcaagaccctgcctctacaaaaaaatttaaaaattttccaggagtggtgacacgcacctacggtcctggctgctcaggtgaccgaggtgggaggatcacttgagcccaggaggtcaaggctgcaatcagccatcattgcaccactgcactccagcctgggtgacagagtgagaccctgtctctaaaaataaaataaaagtctcactttgtgtgtctcattctctcagctcaggcctcggggaccaggacaattcaggccacccatccgatccctagctgggaaagtcacccagtcctagctggtgacctgcagtttggctgagcctgggtccccatatcctataagtggtcagttctggcctggaattcaaggtcacaccatctctctcttggcttggctctcaaatgcctcagtaacctggaattcacctctccgggtctgttcacccatctgcataagggacaaaataataagggtactaccggtcataacaagtaatcatggccgggcgtggtggctcactcccataatcccagcactttgggaggctgaggtgggtggatcacctgaggtcaggagttcgagaccagcctagccaacagggtgaaaccccgtctctactaaaaatacaaaaaaaaattagctaggcgtggtggtgcatgactgtcatcccagctatttgggaggctgaggcaggagaattgcttgaacctgggaggtcgaggttgcactgagccgagatcgcgccactgcactccagcctggatgacagagtgagactctgtctcaaaaaaaaaaaaaaaaaaaagtaatcataataagatactaagtaaccacaataacaatagcaacaagagctgccctagctgtttcaggagatcgttgcgtgcatttgataagatgtgctgcaacgaaacactttggaaaacaataacctgcaccacaatctatttataacaatggtgatgaggactaatcgagtcaatgcatgtaaaggtcttggagccgtgccccacagatagtaagtgctccatcaacactgggtttttgtttggtttttgagacagagtctcactttgtcgcccacgctggagtacagtggtgtgatctcggcccacggcaacctcccctcctgggttcaggcgattctcctgcctcaccctccggagtagctgggactacaggcacgcaccaccacacccggctgatttttttgtatttttagtagagacggggtttcaccatgttggccaggctagtctctaactcttgacctcaagcgatccacctgccttggcctcccaaagtgcttggattacaggcgtgaaccgccatgcccagtcaatactggttattgccgggcacagtggctcatgcctataatcccagatagtccagaggctgaagtggaaggatcgcttgagcccgggagtttgagatcagcctgggcaacatagtgagacccccatctcaaaaaaaaaaaaaaaaaaaaaacacctggttgggctgggcgcctgtggaattacgcgcctgtaatcccagcactttgggaggccaaggcgggtggatcacgaggtcaggagatcgagaccatcctggctaacacagtgaaaccccgtctctactaaaaataccaaaaaaattagccgggcatggtggtgggcgcctgtagtcccagctactagggaggctgaagcaagagaatggcgtgaacctgggaggcagagcttgcagcgagccgagatcgcgccactacactccagcctaggtgacagagcgagactccgtctcaaaacaaaaacaaaaacaaacaaacaaaaaacatggttattattattattatggcctaagaagtattattaatgatactcatggtagttcccttaactctcctctctctgctccccattcacactaatgttctctctattctctgatgaagatgacggttcagcagctcgctgcttacacccaggcagcgtcagcctcacctggcagcctgttagaaagaaatgcaaaatcccaagtcttagcctagacctgttgaaacagaatctgcatttaacaagaccccataggccaggcgcggtggctcacacctgtaatcccaagattttgggaggctgaggcaggaggattgcttgagcccaggaggttgaggctgcagtgagccatgatcgagccattgcactccagcctgagtgacagaacgtgactctgtctcaaaaataaaaataagaaaagtattgagttttattagtccttaactgatggttgacccaaatccacttgactggctggcactggctctcattcactgtcagtcaatgcttttactcaagagatattttatgagcacctactgggtgctggcctcagtctctggggatacagctgtgaacaggacagacaagcaacctgattggggatactccagtgggcaagacagaccactagaaatgagataaataacaattccagtgaatggcaatgtattgcagtctgcttagacctgcatgagtgattgatggactgggatgttggctgataaagtggacacgtggctttaaaagattcctgcctagaaagcaaatattgagaccggacgcagtggctcacacctgtaatcccaacacattgggaggccaaggtgggcggatcacttgaggccaggagttcaagaccagcctagccaacatggtgaaaccccgtctctgctaaaaatacaaaattagctgggcgtggtggcaggtgcctgtaatctcagctacttgggaggctgaggcagaaggatcacttgaacccgggaggcagaggttgcagtaagctgagatcacgccactgtactccagtctgggtgacaaagcaagactctgtctcaaaaaaaaaaaaaaaaaaaagagagagagagagaaagaggattgaagaagatagtaacagaagcagaaatgagcaaagagaccaaagtctgtcagtcatgagaagtaatcacggtggtgatctaattcaatcgctatcagaaggtggccagaaaacattcagaattctcatgaagacaatcggtgaggtgaaatcacgtaagcctcactgtggcatgtaccgtgcctgggtggggttcctactggtggacaaaaccaccacagttataaaaataaagcttccaaacagcaatgaagaatggaagatgcttaggagatgcagtagcttacatgtataatcccagtgatttgggaggctgagacaggaggatcacttgaggccaggagtttgagaccagcctgggcaacatagtgagaacttgtctctacaaaaataaaaaattagccaggtgtggtggtacactcctgtagtcctagctactggggaggctaagaagggaggatcacatgagcccaggggttcaaggcttcgctgagctatgattgcccccactggactccagcctgggtaacagaggaagatcctgtctctaaataataataacaataacaataataataataggagacattctacaggatgatttatctggtttattctcagagtcaatagggtagaaaataggggatcagaaagagactgctgtagactaagtaagacatagaagacatgactaccagaaaattaaatatagaattatcatatgatccagcaaccctgcttctaggaatatatctccaagaatggaaagcagggtctccaagagttatttgtacacctatgttcatagtagcattattctcaatagcccgaaaatagaagcaacccaagtgttcatggatggatggatggatggatggatggatggatggatggatggatggatgggtgggtggatggatgggtgagttggtggatggatggatgggtgggtggatggatggatggatgggtgggtggatggatgggtggacgggtggatggatggatggatggatggatggatggatggatggatgggtgagtaggtggatggatatgtgggtggatggctggatggatggatgggtggatgggtggatggatgggtggatgggtggatggatgggtgagtgggtggatggatatgtgggtgggtggatggatatgtgggtgggtggatggatgggtggatggatggatggatggatggacggatggatggatggatggatagatggatagatgggtggatggatggatggatggatggatggatggatggatggatggatagatggacggacaaaatgtggtctattcatacaatggaatattattcagctttaaaaactaagaaaattctgacacatgctacaacatggataaacctggaggacattatgcttagtgaaataagctagacacaagaggacaaatgctgtatgtttctacttatatgaggtccccagagtcatcagattcatgagacagaaagtggaatgatgggtgccaggggctggggagtgagtgtttcatggagacagagtttcagtttggagtgatgaaaaagttctggagatcagccgggcatggtggctcatgcctgtaatcttggcactttgggagctgagcggggctgaccacttgaggtcaggagttcgataccagcctgtccaacatggccaaatcccatctctactaaaaatacaaaaattagctgggcgtggtagcaggcgcctataatcccagctactcgggaggctgaggcaggagaatcccttgaatccgtgagatggaggttgcagtgagccaagatcatgccactgcactccagcctggaagacagagcgagactctgtctcaaaacaaacaaaacgttctggagatggatggtggtgacggttgcacaacaatgcgaatctacttaatgccactgaactgtatgcttaaaaatggttaaaatggtcaattttacgttgtgtgtattttaccacaataaaaagagagagaaacgatgaaatgcaacacacaagccttcttgattcaaaaaactcaactgtaaaaagatgagcaaggaaatctgaatgtggaccagaaattagatataaaaatcatgattaatattgtcagtgtgatgtgattaagatgtgtctgtgtgctttagagatgtagtctgaagtttgcaaaaatcacataaggtcagggatttacttttaaacatctcagaaagaggatatggatttatgatgtgagtctggcacaatcctgataattattaaattttaatggatacgaaagtctcactgacctctttttcctacttttagtgtattggaacatcttcagaataaaaagctctcacagagcacggtattcaaaaagcgaaggcaaacttctaaaacataagggtagaagcgtgttgtactattaaatcaaactattaagccatttggaaatatatatatcttgttgatgtctcatccttttcacgtttttatttttatgtgtattttacagtgcatataacacatttagcaaaatatttttataaattatatataactaaaaatgcatgggccgtggctacgcatttcagctatgagtgtgctcaaaaattgttttgctggctggggtaggagttcagaagtttggagatcatggctataaggacgctttgggccaggcatggtgactcatgcctgtaatcccagcaatttgggaggccaaggcaagagggtcgcttgagcccacgagttcgagaccaacctgagcaacatagcaagatcccatctttaccaaaaaaaattgtttttaattagctgggcatggtgtcatgcacctgtagtcccagctacttgcaaggctgaggtgggaggatcgtttgaacccaggaggcagaggttgcagtgagccgtgatagggccactgcactccagcctgggtgacagagcaagaccctgcctccaaaattaattaattaattaaaatttgtaaaaatgaaaataaattaaagaaacttttatgggttctagaaaccaaggcagacgttaaagggaataggtgcttttcctggttatttatggaatgatggatgggtggatggacagattggtatataagatgataggtgggtggatggacggaagaatgaatggaagaatggatggaagaatggatggatgaatgggtgaatggaagaatgggtgagtgggtgggtgggttgggtggatggatagatgtgtggacaggtgggtgaatgggaagttggttggatggctggaaaatggatggatgggagaaagaacagggaggtggatgaatggattgatgggtagaaagatggatgggtgatggacggatggatggatggatgcatgcacaattagaagtttaaatgggtgggtggtgggtgggtgagtggacagatgagtggatggaggggaggttaagaggaacccagttttgtggcaggtggtggggaagtcacaacatgccttcctaaatgatgctcaaacacgccagtagatgtcagactaacctcaggaaaccacctcggggccaagcttgcaccaccctggccccatcctgaagttctttgattcaaaatgagcaaaggctcattttaataaaacagtttgcattgcaccctgtatttacacactccctcaccagcaccctcccaactcaaatggcatttataaccccacttcctctcctgcaaatggaaaaatggggccagggtgggtgtctggtgaagggtgcttcccacagggtcaggtcgggagcatcaagagggtaagagagtaaattttggggtcccctaaattgattagtatccatatcagcctcagctccaatcaaaataatatttatattctcatcccacactcctgatgtctgctcaggaatccaccctaggcctgtgcctttgccaaaaaaaaaaaaaaacttttgaggaaaaggaaagtaaaggggaaggggaaagggaaagagaaaagaagagagggaagggaagggaagggaccctgtctcaaaaggaaagaaagaaaagagaaagaaataaaaagaaagaaagaaagagagaggaaggaaggaaggaaaaaagaaaagaaggaaggaaggaaaaaagaaaaggaaggaaggagagaccctgtcaaaaaggaaggaaggaaggaaaggaaggaaggaagaaaggaaagaaggaaaaaaggaaggaaggaggagagagagaagagagacactgtcttaaaaggaaatgaaagaaaagagggaaaggagagagggagggaaagaaagaggaaggaaggaagggagggagggagggagggaaggaaggaagggagggagggagggagggagggaaggagggaggaaggaaagaaaaaacccagtagctcccccactgtgtggaaaaggatgcgtaggggccggcctgagactgaaccttcacacaaaccaccttcaaccctcgaacagccaagaccccagctcaggaaagccattcatccaacattgcccagcagcaactacatgacagagccagttccacccccagtgtctcccaccagaagacccacttttggggtcactgacaaagagaaagggggacccagaaccagactcaactgaagccaccacgtactcccagccctatctaggtccctctctgccttcacacacttctgtcttcagccctgaaacccgcagatttcaactcaacactggaagtagaaatgggattcccacgtttttccccagaaagcagcatttctcagccatctcaacagaaatatttgctggctgagcgcagtggctcacgcctgtaattctagcactttgggaggccaaggcgggtggatcatttgaggtcaggagtttgagaccagcctgaccaatatgatgaaaccccgtctctactaaaaatacaaaaattagccaggcatagtggcgtgtgcctgtggtcccagctacttgggaggctgaggcagaagaatctcttgaacccaggaggcggactttgcagtgagccgagattgggccactgcactccagcctgggtgacagagcaagattcagtctcaaaaaaaaaaaacaaaaaaaaaaaccagaaagaaagaaagaaagatttgccaacccatcagagtggacactcacaatcctgggagcctggtcctggctgccccatccatggttaatctctgttgcctcagcctggggcagctcagggattcacagagccggatgggggtgtccggggggcataaggcaaccagtattgatcagttagcagggaaggattttgagatttcagaagccagcacagccttatcaatatgttccagctgcatgaatttgctccccgaaaaagctcgccaaaaacatcctaacccccaagggatccccggtacagccgcaccgccccccgatcaccaccacccaggcatactcactcccattctttcctcctggcctggggggtgctgtggattttgtgggcctggtgggccaagatgacatctcggtgatccaccacgccgccccgccgcctcagaggggggccctcgaagcagatgctgagccggggaggccgagtgtcctgcagggcgctgggcgtgccccgagctgcggttgtgcagggcgtcatagtaactggggcgcgagagcatggagtcggggacccaggaagacttcaacatccacgggcctcgctcagaaatcccagggtcttctccctccagcacagtgagggggaaactagaagaagaaagaggagacagagagggccagtgtgagggagaggcagacagagctcacagagggcaaggagaagggaactcagaagacaaggagaggccgccccaccctccttcgcagaaagtcaaaatacaccccagcccaggctggccgggatttagtagttccttggcaactcagggcccagaaagccagttcttaggagctgcccggcaacatatgtgccccatggagcaaaacactatgaggctgtgccgcgggcactcgctccacctcccaggtgccggccacagagggcgggatgctggatttctcagcatctctatgtctccttctgcaaaatgagccaccatgggcctgggggttggctctccctcagtcccttggtcctgtgagctctggaaagctgaaagggtgagttcaagaggcagttttaaacgcacgtggaaggctgggtgcagtggctcccccaggtaatcctagcactttgggaggcagaggtagccagatcacctgaggtgaggggttcgagaccagcctggccaacatggtgaagccctgtctctactaaaaatacaaaaatttagccgagcatgatggcccatgcctgtaatccacatgcctgtaatcccagctgctcaggaggctgaggcaggagaatcgcttgaacccaggaggcagaggttgcagtgagccgaggtcccaccactgcactccagcctgggtgacagtgagactctgtctccaaaaaataaataaataaataaataaatccacatgtgagtggccacctgtccagccacactgcttctcaccaggttctctgtttttttaacttcatttttatttttttttagagatggggtcttgctatattgcccaggctggtctggaactgctgggctctagcaatcctcctgcctcagcctccctcttgagtagctggaatgacaggtgcacgccaccacaccaggttacggctctttggtttgtttgtttgtttgtttgtttgagatggagtcttactctgttgcccaggctggagttgtggtgtgatcttggctcactgcaacctccacctcccgggttcaagcaatgctcctgagtagctgggactacaggcgtgcgccaccacgcccagctaacttttgaatttttagtagagacggggtttcaccatgtttcatgtttcaccatgttggccaagctggtcttgaactcctgatctcaagtgaccggcccgcctctgcctcccaaagtgctgggattacaggcatgagccaccgtgcctggccaacagctggtttttggaaagagaaaagagacagggtttcctccactcacacatttatcaggtggacactcaacacaccaaaggaccttgaagccccaagatttttatctccaatcacttaatcattcaacaaactctgagcgaccacccaatttgtgcctggccctgtgctaggtcctggggacgcagccatgaataagactggcaaatgtccccaccctcatggagaaggcattctaggagggagacagacaaggaacaaaataagtgggtacattatatagagattaggagttgaaaagtgctgggaagggccaaaggaccaggtgtggtggctcatgcctgtaatcctagcactttggcggtcagattgcctgagcctaggagtttgaggccagcctgggcaacatagtgagaccccatctctactaaaaatacaaaaattagccaggcatggtggtgcatgcctgtagttctaactacttgggaggctgaggtgggaggatcacttgagactgggaggcagaggttgcagtgagccaagattgtgccactgcactctagcctgggtgacaaagccagaccatgtctcaaaaaaaaaaagtttttaaattgacaaataaaaattgtatatatatatataggccaggcgtggtggctcacgcctgtaatcccagcactttgggaggccggggcgggcggatcacaaggtcaggagattgagactatctggctaacacggtgaaaccctgtctctactaaaaatacaaaaaaatagctgggcgtggtggcgggcgcctgtagtcccagctactcgggaggctgaggcaggagaatggcatgaacctgggaggcagagtttgcagtgagccgagatcacaccactgcactccagcctgggagacagagggagactccatctcaaaaaaaaaaaaaaaagattgtatatatatatatgcacacacacatgcacatacatacacacatacacacacacacatatatatatattttttttgagacaaagtttcactcttgttgcccaggctggagtgcagtggcatgatctcagctcactgcaccctctgcctcttagtttcaagcaactctcccgcctcagcctcccatatacctgggattacaaaattgtacatatttatgatgtctaacatgatgttctcgaacacgtatgcattgtggaatggcaaccttgagctaattaacatgcattacctcacacacttactgaggtctttttgtggctaatctcttcttataagaacacgagtaatattgaattagggctactcatctgacctccttttaccttaattacctttgtaaaggtcctgtctccatatacagccccattctgagatactggagtttagacttcaacatatgaatttgggaagacaccattcagtccttaacaaagaagggtaaggtgtgtaggctggctgcctacaccagctcatgcctgtaatcccagcacttgggaggccaaggcaggaggatcacttgaggccaggaattcaagaccagcctgggcaacataacaagaccctgcctctacaaataatgttttaaaaatcagccaggcatggtggcacgtgcctgtagtcccagctactcaggaggctgaggcaggaggattgtctgagcctgagatgttgaggttgcagtgagccgtgattgtcccactgaactcctgcctgagcaatggagtgagaccctgtgtgaaagaagaagaagaagaagaagaagaagaagaagaagaagaagaagaagaagaagaagaagaagaagaagaagaggaggaggaggaggaggaggaagaagagggagaagaagaagagttgggtagactggtgactttattttatttatttatttatttatttatttatttatttatttatttatttttgagacggagtctcactctgtcatccaggctggagtgcagtggtgtgatcttggctcactgcaagctccacctcccgggttcacgccattctcctgcctcagcctcccaagtagctgggactacaggcgcccgccactacgcccggctaatttttttgtatttttaatagagaaggggtttcactgagttagccaggatggtctcgatctcctgacctcgtgatccgcccgcctcggcctcccaaagtgctgggattacaggcgtgagccaccgcacccggcccgactggtgacttcattaaataggggtgcagagacagcctcactgaggaggtgacatctgagagaggcctgagggaggtgaggagccacatgggtatctgagagaagagctttccaggcagaaggaacagcacatgcaagggtcttgaggcaggactgtgtgtctcaaggaacaaagaagaggcccgtgtggctgtgggtgacgtggtccgtggcttttggaatctacacctcacccaaaagcatatttccagtcccagactgatttttcccacctgagtcagcccctacaactagcctctcagtgtctgtccaagaaaagcgtatctgctgggaggctggcatgaatgaaatagaattaggccatgcacagtggctcatgtctgtaatcacaacagtttgggaggccgagggaggaggattgcttcagcccggaagtttgagaccagcctgagcaacatagcaagaccctgtctctaaaaacaaaaacaacaaaaataaactttgtttaaagaaattagccaggtggcatgtacctgtagtcctagacactcgaaaggcatagatgggaggaaaccttgagcccaggagttcgaggctgcggtgaattattattgcaccactgcattccagcctgggctacagatagcctaccttgttagaaagaaagagaaggaaggaacgaaggaaggaaggaaggaaggaaggaaagagaggaaagaagaaagaaagagagagagagagaaagaaagagagaagggagagaaagaagagaggatggaaagaaaagagagagaaagagaggagagaaagaaaacagagaaagaaagagagaaagagaaagacaaagaggccgggcgcagtggctcatgcctgtaatcccagaactttgggaggccgaggcaggaggatcacctgaggtcaggagttcaagaccagcctggccaaaatggtgaaaccccgtctctactaaaaatacaaaaattagccgggcatggtggcgggcacttgtaatcccagctactcgggaggctgaggcacgagaatcacttgaacccaggaggcagaggttgcagtgagccgagatcgtgccattgcactccagtttgggtgacagagtgagactccatcaagaaagaaagagagagagagagagagtgagagagaaggaaagaaagaaaaaagaaagaaagagagaaagaaaggaaggaaggaaggaagagaagggaaggaggaaggggaaggggaagggaagggagaccctgtctcaaaaggagagagaaagaaagaaagcaagaaagaaagaccccgtcaaaaaggaaggaaggaaggagaaagaagagagagaaagagaagaaagaaagaagagaaagaaatgagagagaaaaaaaagagaacggagagaaagaagagaaagaaagacaggagaatgaaaaaaacagagagaaagagaaagaaaagaaaggagtgagaaggagaaaaagaaaaggaaaagagagaaagaaaagagaagaggaagaagagagagaaaaagaaaagagaggagagaggaagagaaagaaagagaaaaagagagaagaaagaaagaagagagacaaagaaagaagagaaaaagaaagaagagagaaagaaaagagaaaaaggaagaaaggagaaagaaaagaaagaaaggagaaagaaaagagaggagcgagaaagagaaagaaaggagagagaaaaaggaaaaagaaagaaaacaaattaagaagctcaaccctatacagaaacatttcacaagtcacttcaacacccacaggtataagtaggtggtgcacagaatgaggctgcccccagattgcaaagaaccaattgaaggaaggaaggagggaagaattatctccattccatttcctctcaccctgctttaagcatgcaaagaaatgagaactctcccagcctctcctaagcagatcaactcactatcagcttagcaaatgcagttaccttccggtttctttcgaaatcctataactaatggagtttaatagatctatccttcatgacgcttttaagcttcaatttactccagtgaaacctcactcttaattgcccacgattgtgcatttatagtcttttgtgttttgccaaatactttcccattgtgctgaaaaagaaatctgctttccttttataaccacttctgcacggatgccattcttcttcccatttcacagaaataaaactgaaaacaagaggtagattcaagtgtgttccagctacaaggttttatttcacccctccccaaaaatattcttcctgcacatatatttttttttctttttctttttcttttttttttaagaggcagggtcttgctctgtcgcccagattggagcacagtggcaccatcataactcacagcacccttgaagtcctgggctcaagtgatcctccgaagtagctgggaccacaggcccgtgccaccacagcaggctaatttttaaaatttttaaatttttcttagagataggatctccctatgtggcccaggctggtctcaaactccttgcctcaagtgatcctcctgtctcagtctctcaaagctccgggatgataagtgtaagccaccgcgcccggccacaacgatattaaagaaagaaaaaatcggctgggtgcagtggctcacgcctgttatccagcactttgggaggccgaggcaggtgggtcacttgaggtcagcggtttgagaccaatctgaccaacctggtgaaaccctatctctactaaaaatacaaaaattagccgggtgtggtggtacacatccgtagtcccagctacgtgggaggctgagtcaggagaatcgcttgaacctgggaggcgaggttgcagtgggtggagattgtgccactgcacttcagcctgggtgacaaaaaaaaagagaaagaatccagtttacaggttgggtgagctgtgtagtacctacacattaactaaaatcccagaaaccagacacagtgcaagaactttgacggcaaaaattctgaacaagccaggctctgtggctctcacttgtggtcccagctactaaggaggctgagacgggaggatcagcccaggaggtcgaggttgtagtgagcaatgatcacgctactgtactccagcctgggtgacagagtaaggctctatctctgaagattaattaattaattaagttctgaaagcagaaggagtgtttctacctgggaaagtaggaagcagatcaggaagtcaaaacctaaagctaatatcccaggtgacatctttggagacgtgcacctgcttatcccacagcctgacatgggatgctcaatttccctctctggtgctatagcacatagctcccatcctcccccatcccattacaggcttccaaattcaccctgatacccaagccagaaattgagttgtcaatcctggcttctcgcttcccttaactccaggcatcaaatccatccgcaggtaccatctactcacctccaaaatatatcctgagggctggacgtgggggctcatgcctataatctcaacactttgggaggctaaggcaggagcaccttttaagcccaggagctcaactgaacaacatagcgaacaacacagtgagaccctgtctgcaaaaaagaatttttttaaatcagccaaacgtggtggcatgcaatggcaacagtaatcccagctactcagaaggctgaggcaggaggatcacctgagctcaggaagttgagactgcagtgagctgtgatcatgccactgcactccagcctggataacaaagtgaaaccctatctcaaaaataaaaataagccaggcatggtggctcatgcctgtaatcccaacactttgggaggccaaggcgggaggatcacttgaggtcaggagtttgagaccaccctggacaacatgatgaaaccccgtctctaataaaaatacaaaaattagccaggtgtgatggtgggcaccataatttcagctactcaggaggctgaggcaggagaatcactttcacctgggaggaggaggttgcagtgagccaagattgtatcatggcaccccagcctgggtgacagagtgagactctgtctcaaaaaaataaaaataaaaacaaggctggtgcggtggctcacgcctgtaatcccagcactttgggaggccgaggcgggcagatcacctgaggtcaggagttcaaaaccagcctgaccaacatggagaaaccccatctgcactaaaaatacaaaattagctgggcatggtggcacatgcctgtaatcccagctacttggaaggctgaggcaggagaatcgcttgaacccaggaggcgcaggttttggtgagccgagatcacgccattgccctccagcctgggcaacaagagaaaaactccatctcaataaataaataaatacatacatacatacatacatacatacatacatacatacatacatacaaaatatatcctgaatccaaccacttcctgcactgcatggctgccaccctcaatcatttggactggggctgccttcttccctactcccactcccaatccattccctcctctgcagtcagtgcagtctttctaaaatgtcaatcaggccaggtacagtggctcacatctgtaatcctagcactttggtaggcccaggtgggcagatcacctgaggtcaggggttcaagaccagcctggccaacatggcagaaccctgtctctactaaaaacacaaaaattagccgggcttggtggcacttgcctgtaatcccagcgagaggctgaggcagaattgcttgaacccaggaggcagaggttgcagtgagctgagatcacgccactacactccagcctgagcaacagagtgagactccatctcaaaaaataataataataaaaaataaaaataaaaaatgtcaatcagcacatttgcttttgctggaataaaagccgcatcctcccaggctgcctcatccctgtgactttgtcccctccccttctccctgttgcacttttagccccagaatcactggccttgtccctgtttctgggctgtgtcaagctcattccaccttcgcacctgctgttccctcttcctggaatgcttttcccctagtctcggacaagccagcttcctgtcgtcatgcaaggctgtgatcagatgccaacttgcagaaccatccacccaaagcaccacccccagcaggcgttctcatcacgctcgcctgtgaggtcttccttaaggtgtttgttgctccctgagaccagtacgtacatgcgggcttctataacatccacctccctgataggatctcagctgaatttgaacaaggatcttggcctgtctcatttgccattgagtctccaataccttcactatttcttgcctgaatgaatgaataaatgaatgaatgaatattcttaggaatgagtctacccaggaaaatgtcattaagccccttccaaaccaccaccaggggtctgtgacttttcaattttatgtatttattttttaatattattattattattatgattttgagacagagtctcactctgtcgtccaggctgcagtgcagtggtgtgatctcggctcactgcaacctctgcctcctggattcaagtgattctcctacctctgcctcctgagtagctgggattacaggtgcccaccaccatgcccagctaatttttgtacttttagtacagacggggtttcgccatgttggccagactggtctcgatctcctgacctcaggtgatcctcccacctcagcttcccaaagtgctgggattacaggcatgagccaccgtgccctgctgttttattattatttttgagatggggtctcactctgttacccaggctggagtacagaggcatgatcctacctcagtgcagcctcgaactcctgggctcaatcgatcatcccacctcagcctctcgagtagctgggaccacaggtgcacaccactatgcccagctaattattttattttattttttgagagacagggtctcgctatgttgcccaggctgatctctaattcttggcctcaaatggtcctcccgcctcagcctcccaaagtgctgggattacaggtgtgagccactgtgcccagcctgggatgtttttctaagcagggaagggataaagtatgcgggaaataaggcatattctggaggaaggtctaacctcttcacacaacaatgaaccgtggggtcccaggaaaattgcctaagcctctgagtctctgctttctcctccacaacgtggggatcatggcaagtacttcagaaagccgttgtcatgaagggttatcaggctcctccatgagaagtcaatgcaacgaacacagcgctgggccacagaaagtgctaggtccacacctagtctagtgttaacctggggcaggtgggcagagtggggcatctgcaggaaagggggacagccactccagctacatcaccaaggacgctttgcagagcactcgtgagcagttccaacggagccccagctgtcctgtgtgtacacacgagaaacaaacacatttccagccaggggtcgctccctccccagccaggtgcctgcgcctggcacctgcgggggccccatgaccaaatgtgctgtcctctctctctctctctctctgtttgcccaacctcagcacggaggaagtggcaaagtacgtgggcttggcttcactgagaatcagcagggttccaccaacagacagcaccaaagagaagacaatagaaaaagtaaacagaagaaaataaacaacacgaagcctgaggccacagaaagcctcattgttaatggaataacaatcacagcacctgcctgatacgccaggtatcggtggtccccaccactttcccacacctgaaacaggagctgagccctccgctgccaagcctggactggcctgaattgccatggcaaccggatggcacctggagatgctcctgattcacacagcctggtccaggagctctaggggaagagacagagagggagggaccacagggaagtctgggggtgctttctgtgaccctcctacatggacagaaacatttacatgtttctgtgacagacaccaggcttcgccacccacaaatgaaagaagtggtcacaactggtaaaaatgagtaaaagatacaccacatatatatatatatattttttttttttttttttttttttgagacagagtctcactctgttgcccaggctggagtgcagtgactcactgcaacctccgcccatccaggtttaagcaattctctgcctcagcctccggagtagctgggattacaggcacatgccaccatgcccggctaatttttttgtatttttagtggagacggggtttcaccatcttggccaggctggtcttgaactcctgacctcatgatccacccacctcggcctcccaaagtgccgggattacaggcgtgagccaccgtgcccggccccttaatttttaaaagtagaggaaaaacattctctgaaactttgcgggttcatcatacacattggaaaagcatgtgatgctggagccaggcatcatggtgtgtgcctgtagtcctagctactcgggaggctgaggccagaggaccacttgagcccaggaggtcaaggctgcagtgagctatgattgcaccactgcgcttttgctggggtgacagagtgagaccctgactcttaaaaaaaagaaaaaaaaggaagaggaaagatgctccttggaaggagatgggagctcaggaagccccaatatgtcctttgtctaaagaattcaatatagagccagggaggggctggactgtaatcttacaagctcttcttttattctctggtgtgggaaaatgtctttttccacccatcttggaggaaaatttaaaaactaaaaatgagaggccaaggtgggagaatcacttgagccggggaagttgaggctgcagtgagctgtgatctcacctctgcactccagcctgggtgacagagcaaggccctgtctcttaaaataaagtacaagagatggacttgaaacactgttgctggctgtgagatgaaggaggccacgagccagggaatgcaggccacccctggaagctgagaatgaccccctgctgacagcaagcaaggaaacaggactccagtcctacacagcatgaaactggattctgccaacaacttaaatgaacaagaaaacagattcttccctagagcctctggaaggaagcacagccaagcaacactttgatttcagcccagccaggcctgttggctttctgacctatagaaactgtgagataataagtgagtggtttgttttgttttgttttgttttgttttgttttgttttgttttgtttgagatggaatctcactctgtcgtccaggctggagtgcagtggtgcaatctcagctcactacaacctccacttcctgagttcaagcaattctcatgccttagcctccagagtagctggaagtacaggcacctgccaccatgccctgttaatttttgtatttttagtagacacggggtttcaccacgctggccaggccagtcttgaactcctgacgtcaggtgatccgcccaccttggcctcccaaagtgctgggattacaggtgtgagccaccacccccggcccactgagtgtggttaaggcatttatttggtggtaatttggtatggcagcaatagaaaaattaataggcagttacatacatgtagaataattttttacaaacatggaatttgtgagattatatatgtgtatatacatacatacatatatattaaaagtctacaacttttttatacttagtaatatgtcttagataacattccacatcagttcctataggaatgtttcttacaaatattccacatcagttcctgtagtttatttttatgttgttttgagatggggtcttgctacgtcacccaggctggggtacagtggcacgatcatagctcactgcagcctcaacctcctagggctcaagcaatcctcctgcctcagcctcccaagtagctgagattacaggcacacaccaccatacccagctttcgatagtatttttcaatgactccatcaaatttatctggtctggacctctgggtctttctgatttcttgctattccccagaatgttgcagccaacgtcctgcattgtagatcttcaggttctgctacaaatatctctgcagaataaatccccagaggtggaattgctctgtcaaagagtgtaagactgggcgaggtggctcacacctgtaatcccagcacttcgtggggtttgccttcgagtggaatatacgcaggtgtggagtcctggttgagagcacagaagtgttcctttaaaagcagcttaaacactttgggaggccgaggcaggcagatcacttgggaccaggatttcaagaccagcctggccaacatggtgaaactctgtctctactaaaaatacaaaatacaaaaattagccaggtgtggtggcgggcacctataatcccagctacccgagaggccgaagcacaagaatcgcttgagcctgggaggcagagtttacagtgagtcgagattgtgcccctgcattgcagcctgggcaacagaataagactgtcttaaaaaaatttttttaataaatatatttttaaaaagcagcttaaaaacaacatctatgtttgaaatcacatctcctcccctcctctctcttgttctctctctctctcgctctctctctggccttgatcctctttctttcacttgtcatttgatcctgtctttctctgtgtgctaagagctccatcaataaaacaccttaatccagccctggacaaaactagggttgctaagacccaggggcatgatcttccctcccaagttctaggctagagagtgtgaaattcagcagaccgtggattctaacagctactaaggaggcgctgggatgaagatcatctaaatgtcatttgtaatcgaccttcagatgcatttgtcaccttccggatgatgttttatttggctgatagtaaaagcggtttccaggccctgaacaaacactctccatggtaggcagccaggtgtggagcaactgctaaggatcttcctagaattgaaaactcagaaccagggaacaacccaaatgtgcgtcgatggcaggatggataaacaaagagatgtggcacggtggctcacgtctgcaatcccagcacgttgggagaccgaggtgggtggatcacctgaggtcaggcgttcgagaccagcctagccaacatggtgaaactccatctctactaaaaatacaaaaattagctgggcatggttgtgcatgcctgtaaccccagctactcgggaggctgaggcaggagaatgacttgaacctgggaggcggaggttgcagtgagccaagatcgcaccattgctctccagcctgggggacaagagcgagacttcatctcaaaaaaaaaaaaaaaaaaaaaaaaaaaaaaaaaaaaaaaagatgtgggtggtgcacacgcacaatgagaagttattcaggcttagagagggaggaaattctggccgggcgtggtggttcatgcctgtgatcccagcatgttgggagaccaaggcggacagatcacttgaggtcaggagttcgagaccagcctggccaacgtggtgaaaccccgtctctactaaaaatacaaaaattagtcaggcgtggtggcgcgtagcctgtaatctcagctactcaggaggctgagccaggagaattgcttgaacccagcaggcagaggttgcagtgagctgagatcatgccattgcatgccagcctgggtgacggagtgagactctgtctcaaaaaaaaaaattaataaatgaatacaggtatcaatacgtggatataggcaccaataagtgggtataagcaccaataagtgaatagaggcatgaatcaatagatgtaggcatggccaggcgtggtagcttatacctgtaatcccagcactttaggaggctgagggaggcagattgcctgagctcaggagtttgagaccagctcaggcaatatggtggaaccccatctctactaaaaatgcaaacaaaaaaagttagccaagcatggtggcacacacctgtagtgccagctacttgggagactgaggcaggagaatcacttgaacccaggaggtggaggctgcagtgagcagggatcaaaccactgcacacagcgagactgtgtctcaaaaacaaaaaaagatgtagaccccaataagtagatatagacaccaataagtggatataggcaccaataaatggacataggcaccaataagtagatataaacaccaataagtaggcataagcatcaataagtagctacagacaccaataagtggatataggcatcagtaaatagatacaggcatcaataagtagatataggcacattaagtgaatataggcaccaacgagtggttatagacatcaataagtagctgcagacaccaataagaggatataaacatcaataaatggatataggcaccaatacatggatataggaaccaataagtagacataggtaccaataagtagatataggcctcaataaataaacataggcaccagtaactagatataggcatgaataagtggatacaggcctcaataagtaggcataagcgtcaataagtaggcataagtgtcaataagtagccacaggcacctataagtagatataggcatcaataagtggatataggcatcaataagtagatataggcaacaataagtggatataggcatcaataagtggatataggcatcaataagtgaatatagacatcaataagtagatataggcatcaataagtggatataggcaccaataagtagatatagccctcaataaatagacataggcaccagtaactagatataggcaggaataagtggatatagggctcaataagtaggcataagcatcaataagtagccgcaggtgccaataagtagatataggcatcaataagtagatgtaggcatcagtaactgaatataggcaccaataggtgggtataggtatcaataagtagctacaggcccaataagaggatatagacatcaataaatggatataggcaccaataagtggatataggcatcaacaggtagatataggcatcaataaatggatataggcaccaacaagtagagatagcatcaatagttagatatgggcatatacaagggtgtttatgctccttctggccacaaccagaagcttccccatctcgggcagggtggaccccctcccccctatctttgcatagacaagcaaccagcaagatgaaagaaaaagtaaagctggggccaagaagagctctcatcacttggggcaaaactccagaactgccccacatacgtgagaacaaagctaaataaaacgccaggccagatggccaaggttgaacgcaagctgagaccagcaagccagcatagccccaagtgtggctgcaagtgttcatcccctggtgagaataaaccatgtcacagctggtctcgtgttccacccacttttttcttcaccagctggacggtgtgatcatggtgcggtgagataaacacgcaccctcccacagagatgaacagatcacccgggattgctggatggttgggcagccccaggacactgagtgaggctgcaggacgggggaaggaggggaggagacccccaggggtacaggctgttgggctgaatctcaggctaaattcttcctcccaacttcacttcgtggctctgttatcctccccatcactcatgcatccattcatcattcattcattcatccagcaatatttattgagcacctactgtattccaggcactgttctcaacactgaggactaagacatgaataacacagacaaaagtccctcctggagctggcgttctaataaaggagatgaacaagaaacaggaaaagctcctgaaatagacagaatgtcagatagagaaaagaaaacggtagaggaggagggggaaggggaagctgactgtcatttaggtaaagtggccagaatggcctcactgagaaagaaatatttgagtaaagacctgaagggagatgaggatgagggaggatgcatgagggtgtctgtgggaagagcattccaaggcagaggaaaaggcccttgcaaaggcgctatggctggccgtgtggctgatgtgttcaaggaacggcacagaggccagtgtggctggagcagagtgagtgagggggccagaaggtgagggcagggaggtaacggggccaggaggtaagggcagggagataaggggaacagatggtacagggtcttgtgggccatagggagaactttggcttttgctctgcatgaggtgggagctatgaaaggatctaaggagatgagggatgtggcctgactcaggtattcatgggagccctctggaggtcacatttgcaagaaaccccaaatgcagtggaatcaatcaccccagacattgtggggttccttccttctctctttccttcacttccacattctactcatcatcagagctgatgactccgccttgtccttcccctcccacttgccgtaggccacattcattcctctctgaatctcgtctcctccaagtcatcataaacaatcagttcatccattagccagtcccctaaagactccccacagccagctgaataaagtgtgagtcctggccaggcgcggtggctcatgcctgtaatcccagcactttgggaggccaaggcaggtggatcatttgaggtcaagagttcgagaccagcctgaccaacatggtgaaaccccatctctactaaaaatacaaaattagctgggtgtggtggcagacacctgtaatcccagctacttgggaggctgaggcaggagaatcacttgaacccgggaggcggaggttgcagtgagctgagattgcactactgcactccagcctgggcaacaagagtgaaactccatctcaaaaaacaaaaacaaacaaacaaaaaaagccaacaacaacaacaaaaaaaagcaatcagttcatccattagccaatcccgtagagactctttccacaaccagctgaataaagtgtgagtcctttcgccagccccatatatgtgccacgatgtagccccagaattccttccatcctcacttctcactacatgaagctgatgctctgagacaatcctgaccacacctctgactttcaccaccctgaatacctttccctctcctcatccccaaggtccagctcaaaatacatttctgcttcacaagcctcttctagaaaatcctaccagtgcccacacctcctgtctgcccatggctccctgcccctagcacctgccgctcccgacctggggctcctctggccgcaggagtgaagcccatctgcaggggacaggtcacaggtgctacccctggaatattcctcaaccaatggctgctgccaggagttggtagagaaatatccccatctttgcaaccagactgcttgggcttggattcaggatcagctgcctcctgctatgtgaccttgggtaaatcgctccacctctctgggccagtttcctcatctgtaaaatggggataataaaaacacatccttcacagtgtcattgtgaggatgaaataacttaattctatgcagcatgcccaggacagtgtcccacacatggtaagccccaatatgagtgtttgctactgttattactgtgtttacaatgatagtttcattctctgttgaatcctcaaagcctagcacagtgcctggccaacaggaagaactcaataaataattgctgaaaggcagattgccaggtgcggtggctcacctctgtaatcccagcaatttgggaggctgaagccagaggattgcttgaggccaggagtttaagaccagcctgggcgacatagggagaccccctatctcaacaacaacaacaaaataataaattagccaggtgcagtggtacacacctgtagtcccagctacgagggagaccgaagtagaaggttcacttgagccctggaggttgaggctgcagtgagctatgatcaagccattgcattccagcctgggtgacagagccagacaaagaaagacagagacagagagagagagagagagagagagagaaggaaggagggaagaagaaagaaagatggaagaaagagagagaaggaggagggaaggatgaaagaaagaaataaaaagaaaggaaagaaggaaggaaggaaggaaaggagggagggaggaaggagaagggagggagggaaggaagggagggagggagggagggacggaaggaaggaaggaaggaaggaaggaaggaaggaaagaaggaaggaaggaaggtaggaaggtaggaaggaaaggagggagggaggaaggagaagggagggaggaaggagaagggagggagggagggaagggagggagggaaggaagggagggagggagggacggaagaaaggaaggaaggaaggaaggaaggaaggaaggaagggaaggaagggaaggaagggaaggaaggaaggaagaaggtggatcaattattcctcttgtccaagcaaggcaaaaccagtggcatcaggtcaatactgaaactgaaccaaatacctggacacttagcaccatgtgtcatcccctgtccaccttctctctctctctctctctctctctctctgtctctctcacaaacttgcttgacttcatcagcattggagaactaaaaggaaacagtacagagtaccaggaaaaaaataaaactcctcccacagggactgtatttctctaatgtttctcccacaaactaaaccatgcatctgttctcttaagtcattcttgggcaggagtgggtgggtaatgttgcttttattctatctccttgaatttttttcctgattaggtattcttgactcctcaatattgagcaactggtaggtgtttcaccatgtccctcatttatcctgcctctttggccagacagtgtctgtgtgtgtcatcaacatattaacatgttaaagcaataattcattatggaggtcattttctggctttttttttttttagatacagggtcttgctctgttgcccaggctggggtgcagtgacacaatcagaactccctgcaacctctaactcctgggctcaagcgatcctcccacctcagcctcccgagagctgggaccacagacattggccaccatgcctggctaattttaaaattttttatagaaacgagatcttgctctgttgcccaggctagttttaaactcccaaactcaagcaatcctcccaccttggcctcccaaagctctgggattacaggcgtgagccaccgtgcccagccctcagtggtcattttgaattctgatatgctttgtttgttcaacaaatatttattaactaccaactgtgtaccactgtgatccaattatcattcatcttgggatcttaagactctagagaaatcacctaaaaactgcctcccggccaggcaccataactcacgcctataatcccaatactttgggaggccaaggcaggcggatcacctgaggtcaggagtccgagaccagcctggccaacatgatgaaaccctgtctctaccaaaaatataaaaaatgagctgggtgtggtggcatgcacctgtactcagctactcaggaggctgaggcaggagaatcacttgaattcaggaggtggaggttgcagtgagccgagttcacgccactgtactccagcctgggcaacagagcgagactccgtctcaaaaacaaaacaaaacctgcctccccttggggggtcaaaagaaaatgtagtgttggttttgctggagagaaaaataactgtacaccaaaagttgtagtccctttggggaaaaaaagtgagtagcccttgagttgagtcctgaaaaaagatgtttgaagatggtgtctgcctaccatcttcaagattttggtgttggtagctaagaattaatgtatgagttagtagggtccatactaactagtagggttctgttactcatgtctgaccaggacgatttcatggagggtaagacaagtggtacaggaagaagaaagaaatgtgaactaaaaaagaaatcagagaccgggcatggtggctcacgcctgtaatcccagtactttgggaggctgaggcgggtggattgcttgagcccaggagttcaagaccagcctgggcaacacggcaaaacctcatctctacaaaaatacataaaaaattagctgagtgtggtggcgcacgcctgtggtaccagctactcgagaggctgatgtgggaggatcacctgagccctggaggttgaggttatagtgagccgagatcgggctactgcactccagcctgggcgttgagtgagaccctgtctcaatcaatcagtcaatcaatcaaatagttaaaatggtatgctctatgtgtttttttaccataatttaaaaagaaattggctgggtgtgttagctcacacctgtaatccaagcactttgggaggccgaggtgggtggatcacccgaggtcaggagttcaagaccagcctggccaagatggtgaaaccccgtctctgctaaaaatacaaaaattagccaggcatggtggcgggtgcctgtaatcccagctacttggaaagttgaggcagaagaatggcttgaacctaggagacggaggttgcagtaagtcaagattgcaccactgcactccggcctaggtgacagaataagactctgtctcaaaaataaataaataaaaaataaaaataaatcaaacacatgctctggagagtaatttgaaagtagccaacatttagtgagcacgtactaggtgcctgccactgggtatcacctgtggctgggcttctcagcaatgctaagacacagacgccatcgtcatccttgcagtcagcagggggcactgaggcacagagggctgagtggctcccctgggtcacacgccaatgagtatgtggcctccagggcttctcagatgctgactggctcatgactcacccagcctcaagttcaaatgcagattctaactcagcagggctgagtggagcctgggactggccaagacctgcactttgaggggaggatttcttccccggaggctaagtcagtcctccctcgtccactggacaaacttggcctataagggggtggaaaatgcttacccagagcgttcgtctgtctgtcactgtggagacagctagggttgaaggatcctggaatagaagctccctcatttgccctgggcccagagggccctctggtcctatgccctaacattttaaataataataataataaatgaaaccctctgccagagcttttgatgtccacgagttttacaggtcatttgctcagtaatttcactcagtgtcaaatccaccctctccctcctgacccctgtaatgatcttctgttttctttttggggaggctgcattgaattgaacccatcttatgtggagggaaagtggcatttgcaccgagtgacttttttttttttttttgagacggagtctcgctctgtcgccccagctggagtgtgatggcatgatctcggctcactgccacctccgcctcccgggttcaagcaattctcctgcctcagtctcctgagtaactgggactacatgcgcctgccaccacgcccggcaaatgttttgcatttttagtagagatggggtttcaccatgttagccaggatggtctcggtctcctgacctcaagtgatccgtccacctcggcctcccaaactgctgggattacaggcatgagtcactgcgcccggccaccgagtgacatcttgatacatctcctgagatctctgtgtcttggaggaaaatggagtatccacacagggataaactcagcctcttagacttctgtagttggggagacttcctgcagcctggtattggggtgttgaggatggactaggggtcacatgggtaaggggaggtctgtgtcagctgtaagcacctgagatccctgcaagcaactgaaggctatccctgaaagagcaggtgcaggacacggcaaggctgccctagagtcactgtctctgaacaggacaggagccctgagccagggatacctagagaatattcctccacagcacctagggctttgaggagaaggaggagagagagaagcttccctcttgttggttcagcctctgggaaggtgctctgacctcctgttgacattctaaattggctccttctcctgggtcagtctctcaggagcctctaaggaaggagcctggagcaatcaacatgatccccatgccctgccgtccccagcagcgtctgttgtacgaagctgttagcttcaaaggaaggagaggggagaagaggaattctgctgccagtttttcccacttattgagaaacaaaagccacccagacaactcggttcaaaattaaagaaaaaaggcggaaggggcaaggggggaatggcttagagggggtgtccagctctttctctgcttttccttcaagtggggcaagagagggaagaatattaaatattaaaaggaagaagtggtttcctaagacgatgtaattattcccaacagcctaaactccatctgccatttatctctcttttcccaacacattcacgccgcgtcgatcacagcaaacaaggcccaggcacacaggcgtcgggaacttttgttcggggtccccaaagccatgggcaattggggggtggggagcggtgaggggatatttcataattctaaatgttgtcacttgttcaaagcagcacgagacttaaaatgtggacttgaatgagggggggtggggaagatataaaaaagtagaatttgacttaggtcagaaattctcattcttgggaaaacgtcacatgttcagggcagatggcaaagacatcggttgctgggaggggggttgccaagggcaattgaatgaaaatggatttttaagaaagaaacaggaatacgctggaaatgaagagtctgccccccttcttcccagcaagagaaactgttcagaaaagggaagaggttcttaaggcagaagcaagtgaaatctggaaataagctgcccgcccgcaaagaaaaactcttcatagagggagcaggggaagatctttgtatttctacctttgcagatggaggtaatttgcagcaaggaaagaaagattaaactccctgcaggactttgcctccagcgtcccccgctctcagaagccccactcacctgtatcgcatcagcgctggggctcaggcgacgcggctagtggtcagcactgcgagtcctccaggggtcccgagggtcccatctcgtcagcacccaggggtccgagctatctgaagtccatgcatccatggcccacccagtggaaagaagaagggtggcccagagacaggagggagaaaagtgggtgccaagaagagcagttttctgagcagagggctccccacaaaagcagacactgaacggggttgctgtatcagctgccaagggaaaaaaaaaaagaggaggaggaggtttccctgatgctgggaggagggaaaggaggaccgatcgttctcagctgctgatcatctttagctaagtgctacacggggacccagcctggggagatcaatccaggcaaggcagaagctgagaacaagccaggccactgctcctcagggggaaaaataattcacgatttcttgctctcttctctatgccccttaacaccgcactgggacctcccagcacagggcaaaactgttgtctcaaaaaggagactttttccccccgttcgggcttcccttaaagagcagaggaacggtggtaagaagagtattctctctcttccactggttcctgtcgggggtccggggagggggcgtgtagaataggcatcaggcagcagggatatggaatcgtgttataatttaaccatctccactccgccacattgcaacctaaattatttatgctcttagaaaaatgataattagaggacagctgctagcctcctctctgagtctgtcgtgttcattctggaaacagcttcccagtaccctgatctcctcccttaggcagaggggttgtattattaaagaagaaaggcaggaaaaggaaagttgagtcctttcatgcaaaacaccaatccattacaacttggtaagtttgtttgcaatctgtgtagacttatgctctcaaaactagggtaatcccatgtctcttttcaaaggggcctcctgttaaagataggggttttgtttttcctataagaagcatcaagaggccggtgcggtggctcatgcccgtaatcccaacactttgggaggccaaggcgggtggatcacctgaggtcaggagtttgagaccagcttggccaacatggcaaaaccctgtctctactaaaaatacaaaaattagccaggtgcctgtaatcccagctactcaggaggctgaggcaggagaatcgcttgaacctgggaggcggaggctgcagttagctgagattgtgccattgcactccaacctgggcaacaagagagaaactctgtctcatttaaaaaaaaaaaaaaaaaaagaagaagcagcagcagcatcaagggcacagagaatctccgtatttttcccaaggctgagccaaaatggggagaatctacctcattaagaacaaagcagcatttagacaggtggggaaaatcgaacctgactgggtgtcaggggattttaaagaattcatgtgagttttgtaaggactgttggtggtatttggttatggtgttctttaaaagtgtttgtctgttagagatgcatatggaagtatttatggataaggtgatatgatacctggatttgcttttttaaaaactccaggaaacagcaccacataaataaaatatggcatagctatgcaatggaatattattcagccatgaaacggaatgaagcactgatccgtgctgcaacgtggatgaaccccaaaaacatgatgttgagtgaaagaaggcagacacaaaagaccacatggtgtaggattccatttatgcaaattgtccagagtaggcagatccatagagatggaaatcaggtgagtgattggcaggggcaggtggagagggaatgtggagtgattgctgtcagggatggggtttcctttcggggtcatgaaaatgttctggaactagataaaggtgatggttttcacaacatcgtgaatgtgctatggaattgcattttattttattatttatttatttacttatttatttatttttgagacagagtcttgctctgtcgcccaggctggagtgcagtggggcaatcttagctcaatgcaacctccgcctcctgggttcaagcaattctcctgcctcagcctcccgagtagctgggattacaggcgccctcccccatgcccggctaatttttgtatttttagtagagacgaggtttcaccatgttggccaggctggtctcaagctcctgacctcaagtaattgcctgcctcggcctcccaaaatactgggattacaagagtgagccaccgcacctggccagaatagcattttaaaatagttaagtttatgttatgtgaatttcacctctacttaaaaaaaaaatcccaccagaaaagaagggaaaagatacacccgaagagcagaaaactgctaattggccacgcacgagggtggctcatgcctgtaatcccagcactttgggaggctgaggcaagagaatcgcttgagcccaggagttagagactagccttggcaacatggcaaaaacctgtctctacaaaaaaatacaaaaatgcgtgcctgagttcccagctacctgagaggttgaggtgggagaatcacctgagcctgggaagttgaggctgcggtgagctatgatcatgccattgcactccagcctgggcgacagagcaagaccttgtggaagggaagggaaaggaaggggaaagggaagggggaagggaaaggggaaggggaagggaagggggaaagaatgggaagggaagggaggggagaggaggggagggaaggggggaggggaggggagggaagggaagggaacaagaaaataatatttgcttctaaaactgttatggtttggctgtttgtccccggtaaaattcatgttgaaattgaatccccaatatggcagtactgggaggtgggaagcggggagggaggggaggggaggggaagggagggaattgctaattggagaagctgggtgatagggccttggggatttgctgtatttttttcattgtattctctctacttctctactttgtgtatatttgaaattttgtttctgtttttgagacaagatctcattctgatgcccaggatggagtgcagtggtacaatcatggctcactgcagcccaaacctcctgggctcaagcaatcctcccgcctcagccttctgagtggctggtactataggctcacgacaccatgtccagctaatttttttgattttttgtagagatggggtctcgctatattgcccaggctagtaattttctatatttgttttgtttccttttcttttcttttttgtttttattttattttattttattgaaattttctattttaaagagacgtctgggaagtgtggattaagaagaatgcagcccatgtcagtgggtttagaccaacagacaattttggctggacacagtggctcacggctgtaatcccagcactttgagaggccgaggtgggtggatcacctgaggtcaggagtttgagaccagcctgaccaacatggtgaaacccggtctctactaaatacaaaaaactagccgggcatggtggtgcatgcctgtaatcccagctacttgggaagctgaagcaagagaatcacttgaacccaggaagcagaggttgcagtgagccaagattgcaccactgcgctccagcctgggcaagaagagcgaaactccatctcaaaaaaaaaaaaaaaaaaaaaaaaaccagattgggggatttctatgtgggtgagtccagcccgtagttcagcagctggggagccactaggatgggaagcaactcaaagcaaagctggtgggattttccccaggccaggaggcctccaggtccgtcacctacactggagtgtagagaagaagccagccctggggtccctcggcctggagaacaaaaggactcaatccaccctgccagcctgggaccctgcccaagcttcatctccacatcagtaaaaccaggctaatccttcatacctggtggggattttgtgagcattaaatgagatcgtgttaaaaaggaacaacaagaaaataatatttgcttctaaaactgttatggtttggctgtttgtccctgctaaaattcatgttgaaattgaatccccagtatggcagtactgggaggtgggacctttacaaggtgactgggtcatgacagccctcatgaatggactgattcatttatggattaatgaattaatgggctaatggattaaggggttgttatggaagtgggactggtggccttatgaaaagagaaagatgagccgggggcagtgactcatgcttgtaatcccagcacttttgaaagccaaggcaggaggattgcttgaggacagaagtttgagaccagcctgggcaacatagtgagacccctgtctctatttttaaaaggagaggagaggggaggggagaagaggggaggggagaggaggagagggaaggggaaaaggaagagagacctgaagcttgagaccagcctgggcaacatagtgagacccctgtgtctattttaaaaagaaagagaggaaaggagaggagaggagaggagaagaggaagagaaacctgagcttgcacactcagctcctcaccatgccatcccctgcaccgacttgggactctgcagaatccccaccaacaaggagctcctcctcagatttggcctcttgaccttgaacttctcagcctccgtaactggaagaaattaactccttttctttataaattacccagtttcaggtatactttttttttaaatgagacagagtcttgctctgtcacccaagctggagtgcagtggcgcgatcatggctcactgcagcctcaacatctctggctcaagtgatcctcccacttcagcctcccgagtagccgggactacaggcgtgcgccactctgcccagctgattttttaaatgttttatagagatagggttttgccgtgttgcccaggctggtctcaaactcctaggctcaagcagtcctcccaccttggcctcccaaagtgctgggattacaggagtcaaccaccatgcccagcccagtttcaggtattctgttataagcaacagaaagagggctaagacaaaaaccatctctgaaagacacatgaaaatcaatcataggggtccgcttttctctgcttatttttttatatttagggaattttaaaccatgtgagtacgatatggattatatgagttaatgcatatgttaaatagcttgatttagccattgtataatgtatgtatatatatcaaaacatccataagtatatatacaatttttacttgttgatttaaaaatttatttaattaaaacgtgagatcatgcatgtcaagagacatcatactttttttcttttttttttttttggtaaaaggccagataataaaaatcctaggcttggccaggtccgttggctcatgcgtgtaatcccagcactttcggaggccaaggcaggtggattccctgaggtcaggagtttgagaccagcctggccaacatggtgaaaccctgtctttactaaaactacaaaaaattagccaggcatggtggtgcgcgcctggaatcccagctattctggaggctgagacaggagaatcggttgaacctgggaggcggaggttgcagtgagccgagatcacgctgctatactccagcctgggtgacagggtgagactctgtctcaaaaaaaaaaaaaaaaaaaaaaggagaaatttgttcctagtataacataagacgtggttattaaagtgcctcgtgaactcaaaaatgctatgtcacataagctgtcattattatgcagggagtcataagtctatgcaattagcattgaattttcctgtttttaaatcacatgacttgtatgagtcacttcgtgatcaacataaatagtcatcctggtttccttagaagtcctttgaaaatgtcaaaaagttctacttttcctcttacgcaaatgagaccatcctgagtcaaccatcttttaaactcttgtgttttttgccagagttggtgaccatgaatagattgaatgattggccctgatgagtcactctctcctgtgtgcctatctttgcgatggtctcatcatgggtggtgggtacttctccatggcttggccttaggcttggccacgtgacttgcttcagtcaatggtaggtgggcagaaatggcaaggagtgagttccaaaccaggattcagaagccacatgtgtttctgcctgccctcttgcacctctgctcccaccacggaaacaactgtcccaggaggaagaggagggacacgtggagcagaggagtcacccagctgagccccagccagatcagccaaacccagctggtacacatgtgcatggggaataaatgactattgctttaagccactaagttttggggtcatgtatgatgcagctgtgatggttaatttggggtcagcttgactgggttaagagatacccagatagctagttacaccttatttctggatgtgtctgtgtttttagaagagattcgtgtttgaatctgtagactgagtaaagaagattcagcctcctcgatgcagtgagtatcttccaatccactgagggcaaggatagaacaaaaaagcagaagaaggggagatatctccatttcgtgcctcagcctcctgagtagctggaattacaggctagggccaccatgcccggctcgttattttttgtatttttagtagaggcggggttttaccatgttcgttcatgcctataatcccagcacttgggaggtcaggagctagagaccagcctggccaacacggtgaaaccccatctctaataaaagcacaaaaaattagccaagtgcggtggcacacgcctgtaatccagctacttgggaggctgaggctggagaattgcttgaacccgggaggcagaggttgcagtgagctgagattgccccactgcactccagcctaggtgacagagggagaccctgtctaaaaaaaaaaaaaaaaaaaaaaaaaaaaaaaggaacttctgtccagtagccaaagtctgggcaccttctctatgattccaattggtttttcaactctgccttcaaaaaaaaaaaaaaaaaaaaaaaaaaaaaaaaaggccaggcacagtggctcatgcctgtaatcccagcactttgggaggccaaggtgggtggatcacgaggtcaggagatggagaccatcctgggtaacatggtgaaaccccgtctctactaaaaatacaaaaaattagccgggtgtggtggcacacacctgtaatccagctactcggaaggccgaggtaggagaatcacttgaacccaggaggcagaggttttagtgagccgagtttgcgccactgcactccaggtgggctacagagcgagactctgtctcaaaaaaaaaaaaaaaaaaaaaaaaaagccaggcgcggtggcttacgcctgtaatcccagcactttgggaggctgaggcgggcggatcacgagatcgggagattgagaccatcctggctaacacagtgaaaccccgtctctactaaaaactacaaaaaattagccgggtgtggtggtgggcacctgtagtcccagctacttgggaggctgaggcaggagaatggtgtgagcccggaaggcggagcttgcagtgagccaagatcatgccactgcactctagcctgggcaacagagcaagactccatctcaaaaaaaagaaagaaaagaaaagaaagaaaagatgctggaagcaaaaccatttagaaagcaatgtcatgtgttgatccagttagaaaactgggagggccttggtcagccagtccaggaacgaggcagagaatactacctcacttacctccaagggcccatgcaaaaaacagagggcacattcaaactgggtaatctgagaagcatttaataaaatatatttacagcaaaggctggatcggttggataatgcaacagcaactacaggaagctgttaccacccacacctgaaggggtgaagaagagaaggttctaggctccacagacacagggagaattgtgcagaaaaggcagcctgaaagagggacgcacacaacccatagcaacctgaaacagaggaagccaaggaaataaatttaaattcccttaactggccgggcgcggtggctcatgcctataatcccaacactttgggagatcgaggtgtgtggatctctttaggtcaggagcttgagaccagcctggccaccatggtgaaactctgtctctacaaaaaatacaaaaattatccgggtgtggtgtcaggtgcctgtaatcccagctactcgggaagctgaggcagggagaatcacttgaacccaggaggtggaggttgcggtgagctgagatcacgccactgcactccagtctggttgacaaagtgagacgactacgtctcaaataaataaataaataaataaataataaataaataagataaattccctcaacctcacccttctcccacttttttttttttttctgctctgtcacccaggctggagtgcagtgacaggatcatagctcactgcagcctcgacctcctgggctcaagtaatcctcctgcctcagcctcccaagtaactggcactacaagtatgtgccaccatactcagctaattcttccttccttcctccctccctcccttccctctctctctccttccttcctttttttttttttctctttcttttctttttctttctttggagagatggagtctccctatgctgcccaggctggtcacaaattcccggcctcaagcaatgctccccgctcagcctcccaaagtgctgggattacaggcatgagccatcgcaccttctctcacttttcatctgtgagtaactcccattggctgagccaaccaaaagccagtgggcaacagagcccaatgatgttgtcttttggggtcagcctcaggaacagaagagggtagaaggtgaggaagagtagagctggaaggaaaaatggactttacccactttctcttaaccagttctcagctgacaaagcatcttcagcactttctgcatccctgcaattcaggtcatctttctcagcagcctgcttggctgatctgattcctttttccttctctggctaccaaaggaaacagatacaaaagggaaaattgattttccagggaagcctccagtaagcctcaaggacaatcccatttatgcatttatgttcctcgtgacatctggttttgagccagtcccgctgtgggtggagtgctgttactatactgtttatgttctgatcgtatttctcttggcccagagagcaggcagctggccaaacatataatgccctccatgggggcagaggtctctctctgagcccaacagctgagccccgcacacagagcgctactgggaaatttgacaccatctaccatcagcagaatgaatgcctttgccattggcccaggcaagaaaatcgttgcttgcatatcctgggcaaagtctagttatgcattaacagtgacagaaggacaattaggatgcaggaaaccaagaaataatatgtgagataaagtgtacactctccttgcctgtgtgagccaattgtttaaactgcaagaagacacacaggctctgaaatcgaatccttctgtgctcagaccccaactttatcacttcctggtgccatggtctctcttcctttccttccttccttccttctttccttccttccttcctctctgtctctctctctcttttccttccttccttcctctgtctctctcttttccttccttcttttcttccttcctctgtctctcttttccttctttctttccttctttccttccttccttcctctctttctctcttttccttccttccttcctctgtctctctctcttttccttcctccattccttctttccttccttccttcctctctctttttccttccttcttctgtctcttttccttccttctttccttccttcctctctctcttttccttccttccttcctctgtctctctctcttctccttccttccttcttctgtctctctcttttccttccttccttccttcgcgcgcgcgcgtgtgtgtgtgtgtgtgtgtccactgcctatgttcaaaattctcctccttctatgaggataccagtcatattggattagggattgccagggtttgaatgcatgtgtgcacccaaattgaaatgttggaccctaagacccatgcaatagtgttaagcagtggggcctttagaggtgattaagtccggaggactctgcccctctgaatgggattagtaccttaaaaaagggcctgagggaactagctagggcctttggcccatctgttctttttttttttttttttttttttttttttttttttttttgagacggagtctccctctgttgccaggctagagtgctgtggcgtgatcttggctcacggcaacctccaactctctggttcaagggattctcctgtctccacctcccgagtagctgggattacaggcatgcgccaccatgcttggctaatttttgtatttttagtagagatggggtgtcactatgttggtcaggatcgtctcgatatcctgacctcgtgatccgcccgcctcggcctcccaaagtgctgggattacaggcgtgagccaccatgcccggctgcccatctgttctttaaaaaaaaaaaacaaaacaaaactttttttgagacagggtattgctatgttgtccgggctggtcttgaactcctgggctcaagtgatcctcctgcctctgcctcccaaagtgctggcattaaaggcacgagccaccatgcctggctgcccttttgttcttctgccacgtaaaaacacaacaacaagataccatctcgaaggcggaggacaagccctcaccagacactgaatctgctggtgccttgatcttggacttcccagcctctaggaccataagcaataaatatctgttgtttacaaattacccattctctggtattttgttatagcagcaggaacgaactaagactaggcccaccccagtgacctcatcttaatgaattatgtctctaatgacccaagttccaaataaagtcacattctagggtactagaagttaggacttcaacttatgaacttttttttaagacacgaggcctggctctgtcacccaggctggagtgcagtggcgcagtcatagctcactgcagcctcaaactcctgaactcaagcagtcctcccacctcagcctcccgagtagctgggattacaggtgtgtgctaccatgcccagctcaacttatgagctttcaaagacataattcaacccataatggtaacttaatctgagtctcagtctccctgtaaaacaggctaagaaccttgaatggacaaataatcttgatgaaatgattatgaaaaagggaggcatttaaaacagtttctggcacagagtgggtcctgaaaaaaccgtccggctaggaaaagatgtgctaaagacttccagggggagtccaggggtgtaggaaacacggagaaaagcctgcagataaatcagtgagtgacactaggtatcatgtaacactgtcgtcaattttgctaagatataaattacaagccaggcacagtaactcatgccagtaatcccagcactttgggaggccaaggcaggcgaatcacctgaggtcaggagttcaagaccagcctggccaacacggcaaaaccccatttctaccaaaaatacaaaaattagccaggagtagtggtgctatcctgtaatcccagctactcaggaggctgaggcaggagaatcacttgaacccaggaggcagaggttgcagtgagctgagatcacatgaccgcactccagcctgggcaacacagcaagactccatctcaaaaaaaaaaaaaaagatataaattagtacaataaaatgtacctgagctggctgcagtggcttacatctgtaatcccaaggactcaggaggctgaggcaggaggactgcttaagcccagaagttgaagactgcaggaagctgcaatcctgccactgcactccagcctgggtgacagagtaagaccctgtctcttaaaaaatgtttgagcacggtggctcatgcctgtaatcccagaactttgggaagctgaggcaggtggattacttgaagtcaggagatcgagaccagcctggccaacatggtgaaaccctgtctctactaaaaatacaaaaattagccggccatggtggtgtgcacctgtaatcccagctatttgggaggctgaggcacgagaatcacttgaacccgggaggcggagagtgcagtgagctgagattgtgccactgcactccagcctgggtgatagagggaggctctgtctcaaaaaaaaaaaagtgcacccatcttcagtgtacagtttgcaggttttgactaatgtgtacaacacataaccgccaaagatttagaacatttccatcactcccaaaatgcccccatgcccctttgtggccaatgcctccattcccgtcccccaggcgaccactgatctgtctgtcactttagattcaacttgcctattctataattgtatagaaacagaatcacaccaggggcagtggtccatgcctgtaatctcagcactttgggaggcccaggcagtaggattgcttgagctcaggggttcaagtccagcctgaacaacatagtgagacattgtctctaccaaaaatccaaaaaaattagctgcgggtggtggtatgcacctgtagtcccagctactcgagatgctgaggagagaggataacttgagcacaggagattaaggctgcagtgagttatgatcgcaccactgcactctagcctgggtgacagagaaagaccctctctccaaagaaaaagaaaagaaatgggccgagcatggtggctcacacctgtcatcccagcactttgggaggccaaggcgggtggatcacaagttcaggagttcaagaccagcctggccaacatggggaaaccccgtctctactaaaaatacaaaaattagccaggcatggtggcgggcgcctgtagtcccagcttctcgggagactgaggcaggagaatcacttgaacctgggaggcggaggttgcagtgagccaagatcatgccgctgcactctagcctgggtgacagagcgagaccttgtctcaaaaaaaaaaaaaaaagaaagaaaataaaaaaaaaaaaaaagaaaaagaaatggaatcatacaatcatacagtctgtcctcttttgtgattggctcctttcactccacacttgtgagatgcatccttctgatcttttcatcagaatctgttcctttctattatactccagtgtatgggtggaccactgtttgtcctctctcttgtgaatgggcatatggtttgtttctagtatttggctaacatgaataaagctgctatgaacatccatgtataaaagtctttgtcggggccaggctcagtggctcacgcctataatcccagcactttgggaggccaaggtgggaagatcacctgaggtcaggagttcaagaccagccaggccaacatggtgaaaccccgtctctacaaaaaatacaaaaatgagccaggcatggtgatgcatgcctgtaatctcagctactcaggaggctgaggtgggagaatcagttgaacctgggaggtggaggttgcagtgtgctgaaattgcaccactgcactccagcctgggcaacagagcgaggctctgtctcaaaaaacaaacaaacaaaaatgtctttgtggggatcctgggtaaataccagagagcggaattgttgagtcacctggtgagtgtccatttaaccccataagaagctaccagactgtcatccaccaacagtgtgtgcatcactctacatcctggccagcacttggtatcacccgtctttttgattataactattctagtggatgtgtggtgacatctgcctggggttttaatttgcatttccctaatgtctaatgatgtcgtatgcatgctcatgcatgagtaagctttaaagacacgaagggaaagcccgggggtcagagaagacattgctgagagtcaggaggtgggaatgcaagatggcactgcagaggtttttagggtgtgggagtgagggggtggatggaagggcatactgggcataccacagggtgggagatgaggccttaggtctttgcaagatggtgagtaggaattgaggctccctgtataaagtagggatcctggtaggaccacacctagggacagggtaccaggaagactctccaccagcccaaggtgagcacaggggagctcatcttttttgctttttttttttttttttttttgagacagggtcttgctctgtcaccaggctggagtgcagtggtgcaatctgggctcactgcaacctctgactcccgggttcaagtgattctcctgcctcagcctcccgagtaactgggactacaggcatgtgccaccacgcctggctcatttttttgtattttagtagagatggggtttcaccatgttggccaggatggtctcaaactccagacttcgtaatccacctgcctcagtctcccaaagtgctgggattacaggcgtgcaccactgcgcccggccatctcttttctgaacattgaaaacacatacatataggtaataaccagtgtgctctaggatgtgggaaacagacattaatttacactgttgggccgggtgcagtggctcatgcctataatcccaacactttgagaggccaaggcaggcagatcacttgagcccagcagttcaagaccagcctgggcaacatggcaaaaccccatttcggcctggtgtggtggctcactcctgtaatcccagcattttgggaggtcgaggcaggtggatcacttgaggtcaggagtccgagaccagcctgagcaacatggtgaaaccctgcctctgctaaaaatacaaaaattagccgggaagctaaggcaggagaatcgcttgaacctgagaggcagatgttgcagtgagccaagatcgtgccactgcactccagcctgagcgacagagtgagactctgtctcaaaaaaaaaaaaaaaaaaaaaatctctgccaaaaatacaaaaattagccaagtgtggtgggacgtgcctgtagtcacagctacttgagaggctgagttaggtgggaggatcatttgagcctggaaggttgaggctgcagtgacctatgattgcaccactgcactccagcctgggtgatggagcaagaccctgcctaaaaaaaaccccaaaatttactctgtttactctcagctcactgcagctcagacctctccaggcttaggtgatcctctcacctcagcttcctgagtagctgagaccacaggcgcgcaccaccacacccgactaatttttgtatttttttgtagagacatggatcctgctatgttgcccaggctgttctcaaattcctgggctaaagtgatctacccgactcagtctcccaaagtgctggcattacaggcatgagccaccatgcctggcctcttgcttacgtctactttggacttgctctcagattcttttgtgtggcgaagtgtaaaacctggactggctcagcagcaacaattggattttagacgagtagacactccaaaagatgttcactacaataaccattatctcagcacttcatttctaaccttaactctaacctagagagacaattgcacaaatgttcagaacagcctgtatcagttacctaatgccatggtaatgctgcgtaacaaatggatgtgaaaacgtcagtgacatgcaacattaagtttattgctcatatatctggggcaccctcactaatggggtggaaaggaggtgatcaaaacatccagccagaacatctgcttctcttcctcctccttccctttcccttcttcctttatcaactctagcatttactgaacaattcttatgttctggacactgctcaaaaagcttcacaggtaataagtaagttcattttcaccaggagataagtgtcactaacatatccactttgcaaatgagaaaactgagtcagaaagaagttaaataactggcctgaaagcccatagctagtgaggggtagactcaaagagtccttgcttctaaaccctaagtccagagggcaacaacctttttatataaaggaccagaaaataaatattttaggcttcatgggccatgtggatttggcccatgggccatagtttgctgacccttgccttaatccaacagcctaagaaccttcaaagtaaagctgaccagagctttacctttccacgagatttccaacaaacccctaaatccagtaaattagaagaagggtgtaattcaccatgaatgaattaggctgattgctgcataattcatgattatcaaaatgatgttttaatgtcagtcatcttcttaagatattttttaagacttctaggcactgtcctattgcaggagaaaaatgtttttatacctttttttttttttttttgagacagtgtctccctctgtcacccaggctggagtgcagtggcacaatcacagttcactgcagcctcaacctcccaagctcatgcaatcctccctcctcagcctccctagtagctgggactacaggagtgtgccactgtgcctggctaattttttatttattttttgtagagatggggtctcactactttgctcaggcaggtcttgtacgcctgggctaaagtgatacccctgccttggcctcccaaagtgctgggattagaggcatgagccaccacacctggccacaggaaaaaattctgcttcagtggaaaattagacactgtctagagcagggattggcaaaccacagcccagaaaccaaatccaaccactcctatttgtttatattttttacagctgttttcatgcttcaatggaagtggagtagttgccatgtagaccatatgtctagcaaagcctaagatatttactacctggccctttacagaaaaagcctggcaacccatagggtaaagaacactcttctgagttatctgattctagcctttcctttcctttgacctattttactattctgcaagttcttgataattgatagcaatgcaaaataatcctttttttgtagacaagaaaaagctgtaatgtccaccagaagttcaacctacttccctccaccactacggaagagttcaatttgcacagtcatttcagtgtttctgatccataactgtgtcttttatttgaatgcgcctttgaatgagttgtaacattggttccgtcattcatgaggaagataaaatctttaacacacattcacttcacatatgtatgaaagtcatgatttttcttctttctttaattattcttgaacattatttatggtttcataagagtttagagagctgctctccaatggacattaaaaaatatctgcatcattctactagatcttgtaatagtagccctgagctataaattttgtaccagaaacttgagaaaaagtttgcctgacttaatggcattttgggaggctgaaaaatcaacttttgagtattaaactggaaatccaaaaccagatgtggtgactcacacctgtaatcccagtgttttgggaggccaaggcaggaggatctcttgaggccaggaattcaagaccagcctgagcaacatagcaagaccccatctctacaaaaacaaattaaaaattagtcagtcatggtggtgtacgcctgtagtcctagctacttgggaggatctcttgagcccagtaattcgaggctgcagtgagtgatgagcgtgcctcttcactctagcctgggtgacagggtcactccctctctctaaaaaataaaataaactggaaatccaagtaactagataatgaggagataaaacataaaacactcttagaagttatgagtatgtgatatggcttgaatgtgtccccacattttatgtatttgaaacttactccccaaatttatatgttaattcaaaacagggctttgggaaggtatttaggatcagataaggtcatcagggttaaacgttcatgatgggactggtggctttataaaaaaaggaagagagacctgagtttacatgcacgctcttgccccctcactacaggatgccctctgccatgttatgacacagcaagaaggccctcaccagatgtcagttcttcagtcttggccttcccagcctccagaactgtaagaaaaacatttttttcttttttttctttcttttttttttctttttggcagcgtcttgctctgttgcccaggctggagtgcaacagcacgatctcaactcactgcagcttccacttcctgagtttaagtgatgctcacatctcagcctcccaagtagctggacttaacaagcatgtgccaacatgtccagctattttttttttttttgtatttttagtagagacaggtttttgccgtgttggccaggctggtctcaaactcctggcctcaagcgattcacctgcctcagcctcccaaagtgctgggattacaggcatgagccactacgcccgacatttattttctttataaactacccagtttgtgatattttcttatagtaatgcaaagtagactaagtatataagtgatcgttgatgccaaaaggatggttgagatcccccagggagtgtggggggaaatatgagaagaggaaaaggcagacaaatggggagggacagggtagaggagcagctgaggacagctaaagttagactggacagagcagcattgtgggctgcaacagcatgggccaaaggagcaccaaggcagatgcatcaacaccatcaagttgtgcataaaggtcaaggaagggctgaaaagtggccattggcttgagcaaataacaggtcattagtggccttggcaagaacaatttgataggaatggtggattgaaaggcaaacaacagtgggtttggagtgaatggagagaaggaagtggaattacagttggctgaataaatgaagaataatgcctgattgctgcagggttgttatgacaaccaaataagataatgatggtgaatactctttatggaattttttattgaggtatcatttatatacagtaaaatccaccctttattagtatacagttctataggtttggacaaacatacacagtcttgtagcctctacaaaaatcaagaaatagtacagttccctcacccatagacagttctcttttgatcctttgtaattaatcccttcctgaagccttagcccatagcaatcattgatctattttctgtccctacagccttgccttctctagaaagtcacataaatcaaagtgtacactacatagacacttgagtctggcttctttcactcagaataatgcacttgatattcacctatcggtattttatttttttaattgctgagtaatattccattgtatgtgaatattccatcacttttttttcataaaagtgaaatgctgtataaaattgtaaggacttattattcttggaaaatatatatacatgcaggcaggaaagtctgccttagtttgggctccctcagaagctgaccttgagacatgattcaagtgaaagttgtttattttagagtcagttccaggagactcagtatgggaagataaagtgacacagggaaggaaaacaacaagcatcaagcaagttaccactgtgggcaactgacgctcaatctactggtgacctctaggagacaacatagaatacagatctcagaattgcccagcagaggagtgagggagctgggatatttatcctccaccttcctaccagtcactgattgacagccactcatggaggacattaaatctctagcatttctggcccaactgtgtagatcataatgtgtaccccaaagaccagagacagtcctcaaacaaatgaatgcaggtgctggccactggaaattaggccagagtgtgctgaccaaggatgaggtaggggaaggccaggtgccgaccattcctcctatagagtggatacataatcagatcataaacgatctccccttaattttcatctctttcttaagctgtaaacatcaagtatttttatagctcttcaagatgcactgcatggagaccttctaaatcatctctatgtcctctaattgggcttgtcactcacagctaatattgctatatttatagttaatctctccatatagcgtcttatgacttatttttggatttgtgagtcaggcgtgcatactccaatatgcatgctcatgctgctgtttatctatctctacgggaaaacaggatgttgtgttccttttttccctgcctcaccgtacccactcctgacccttgtctgacagcctttggcttatattaattttcataaataccttctgcttacttcatagttttccaaatattcgaaaatactttatttcacttaatctgcaggataacactaggaggcaagcagagacctcttgcctctaatgcattttacacatgagaaaactgaggctcatgtcaattaaaaattaatttaagctatttcatttaagttaaaaattagtttccactgcatcatatgggatgcttctagttgtgaataactaaaatcccaaactgaattaaacattaaagaaaattatcagctcacatgaagaatataataaataaaaagtaggatgtgctttcaaaagaggtttgatgtgttggctcacaagatgactgccaggaggaccttctgcaacttcacgccccttgttcacaaccggagatggatatacactacctccatcctgagattcactctgattggcccagtccatatcacatgaccacctctgagccaatgaaggtagatggggtatgctgattggcctaaactggtcacatggtctacccggaagctaaggcaaaactcacttccctagaaatagatggagtcccaagtgaaaaacagcaagaaagggaaaatattggaagacattcatggaaagtgggttaattaggaatgttgtcatctgtaggttaccaataacctgagtaagagtggcttaaataaataggacttcagttttctcacaaagcgaaaagtatggaggtagatgatagccattttttaaaaagccattctcaggcacgggcagtggcttgtctgtaatcccagcactttgggaggccaaggcgggtggatcacttgagatcaggagttcgaggccagcctggccaacatggtgaaaccctgtctccaccaaaaatacacaaattagccaggcatggtggcgggtgcctgtaatcccagctactcaggaggctgaggcaggagaatcacttgaacccgggaggcagaggttgcagtgagccaagatcatgccactgcactccagcctgggcgacagagccagactgtctcaaaaaaataaataaatgaattaaaaagccattcttctctccttctttcacccaccatcctcactatattgcttttcctccttaaatttaatcacttcatagtctcaaaggtggctgctacagctggaaaggaggagtaagttctagtgttctataccactgtaggatgactatagctaacaattatgtatagtttccaatagctagaaggaggatagtgaccgtcccaacacaaagaaatgataaatatttgaaatgattaatatactgattatccctgatctaatcactatacatcgtatgtatcatgtacaattatttgtcaattaaaaataaaattttaaaaaaaaatttattttatgtttatttttattttttgagacacagtctcactctgtcacccaggctggagtgcagtggtgcgatctcggctcactgcaacctccgcctcccgggttcacgtgatcctcctgcctcagactcctgagtagatgggattacaggtgcacaccaccacacccagctaattttttgtatttttagtagagacagggtttcaccatgttggccagactggtctcgagctcctgacctcaggtgatctgcccgcctcggcctcccaaagtgctgggattacaggcgggctgcctggccaattttgtattatttatttactttttttttttttttttgtatgagacagggtctcactccgtcacctaggctggagtgaagtggcatgatctcagctcactgcagcctcgacctcctcagctcaggtgattctctcacctcaggctcctgagtagctgactaaaagtgcccaccaccaggtctggctaatttttgtaattttttgtagagatgggggtttcgccatgttgaccaagctggtaccgaactcctgggctcaagcaatccgcctgccttggcatcccaaagtgctgggattacgggcctgtgccactgcatcggcctgctcttgccttttaacaaggaataaatctgcatcttcaagagccctccagcagacttctttatcatgggtcaagttctcccaatgtagagtctagtctaaaataagcatcctgatgcaaagggtttattgagaaggtttgttccagaagaaaccatgaagggaataaaggaagcagaacaaggaaagggaagaagacaagacacggagaggaagttccagcctaacccctcccccatagagagctccacagcttaaattccatcttggagactgtcccatggtgtctctcaatcagagaagcagaaccactgtgagtgatctagaacggggaatttattatgggatttgaccttgtgcaatagtgagttagtggagcagactgtggcccttggtctggtactgggtctgcaatcactctaggtcagccagcccatccgtcaggagggaacactagctgtgcacaagagcagggaggagcagaacccacgagggacttgcgtctgtctcgcaccacctgcaacctcaatgtcgtgagtgacctgcaggtgaagctgtcatccttcaccttggagctgcgtgttcacttggcctagttctcagggaagatgaaagagatctggcaagagctggagaagagccaacagctctgcagcaatgtgtgtgtgtgctgccgccatgcctgacacctccaggaagattaaaaactagggtcattgctttacatccatcttccaaatcttgtgcaggttattcttctagccaactctaacccagaactttacagggaagagagaagggagaaatgttcttccagcttagctgaattgacgttatccaaagccaaatgtcccacctggagaaaaaaggagttagctcctggctataggtgcccccagagaagacgcaaatacacaggcattccccagtctctgtgcaggcaaggaggtccccgtgtccaaaggcaaccctgtgatggccacagaggctggacgtcagcagcaaaacacgcagaactggtaaagggatcagaggggatctgggcagggcatgacaatggccgctacatttactctacatctcaatggccagagtcaatgtcacatccctgccctgactcatacaggtcaaggttccagtctaccccagagggtaaccaacccacatccaccacatccaccattagcatgagagccaaggcaaagacaacgtcatgtaatccccttccagtgtcctttccactgttttcagtattgactgttttcagaacataattaatcaagattagatgtctagaaaaccttgtttaaaatgtgttggccgggcacagtggctcatgcctgtaatcccagcactttgggaggccgagacgggcagatcacctgaggttgggagttcgagaccagcctggccaacgtggtgaaaccccgtctctactaaaaacacaaaaattagccaggtgtggtgttgctcacctgtaatctcagctactcaggaggctgaggtgggagaattgcttgaacctgggaggcggaggttgcagtgagccaagatggcaccattgcactccagcttgggcaacaagagtgaaattccgtctcaaaaaaaaaaaatgtccagtaaaccttgtttaaaatgtgttggccgagcacagtggcttatgcctgtaatcccaacactttgagaggccaaggggggcagatcacctgaggtcaggagtttgagaccagcctggccaacatggcaaaaccgtgtctccactaaaaatacaaaagttagccaggtatggtgttgtctgcctgtaatcccagctactcggaaggctaaggtgggaggatcttttgaacacaggaggcagagtttgcagtgagctgagatcatgccactgcactgcagcctgggcaacagagtgagactccatctcaaaaagaaaaaaaaaaaaaaaaaggcgtggtttcctcccatcttcccaaatgaatatctgaagtatttatctctaaatcaactgttcttcaaagtgtattctgtgaacccttaaacctaagacccttttgagaatccatgagatccagtggtgtactgagacctatttctatcagctagaagaaaccaattgttaaaatgttcaggcactggtgcgagccagttgatagcttgaaattggccatggaagaagtatttacaccatggaaattggcatgcagagcttttttccctcccctttccatgagaaaatagttaaacatttaccagcacacctccgtttgtagtaatattaagacctgattttcctttttctctgtgttgtcatttgcactgttggtaccaaaggaatggtggggaaaactgctggtgccttagcaggaatcaatgcagtattacaatattgtactagtaattgtttttttcataccatgcactcacagtgaggaaggaagggaagaaggaatgaaggaaggagggaaggaaggaaggaagggagggagggagggagggagggaaggagggaaggaaggaagggagggagggagggaggggggagggaaggagggaaggaagggagggagggaaggagggggagagagggaaggagggggaggggggaaggaaggagggagggacaacttcacttaaagttgcagtggtccacacctgtagtctcagctactcgaggtgagaggatcccttgaacccaggggttcaaggctgcagcacaccatgattgtgcttgtgaagagccactgcactccagcatgggcaacatggccagaccccctcttaaaaagttttcaattaggctgggtgcggtggctcatgcctgtaatcccagcacttcaggaggccaaggcgggaggatcacttgaggtcaggagttcgagaccagcctgaccaacatggtgaaaccccatctctactaaaaatacaaaaattagctgggcatggtggcaggcgcctgtaatcccagctactcaggaggctgagacaggagaatcgcttgaacctgggaggcagaagttgcagtgagctgagatcgtgccactgcactccagcctggatgacagagcaagactccatctcaaacaaacaaacaaagtacaaggtaaaccaatggattttaatgaaacagaactgattaaaatggattcagatttctcggagcaactgatctttaagaaacttccagtttttgagttttggtgtagtatcaaagagtaattcctgaattttctgaaatattgaaataatttcctcccttcatcaactacatgtatgtagattttcttgagtcttcaaccaaaacaatgtatcacaacagagtgtgtgtagcagctgtgagaataaagcagtcttctattaaaccagacagtaaagaaatttgtaaatatgtaaagcaacgccactcttctcactaaatttttttttaaatataataaaatatattcattgtgttaggctgggcgcggtggctcacgcctgtaatcccactactttgggaggctaaggcaggtggatcacctgagatcaggagttcgagaccagcctggccaacatggtgaaaccccgtctctactaaaatacaaaaaattagccaagcatggtggcacacacctgtggtcccagctactcgggaggaaattcaaggctggagtgcagtggcacgatttcagctcactgcaacctccatcttcccggctcaagcaattctcctgcctcagcctcccgagtagctggaattacaggtgtgtgccaccatgcccagctgatttttgtagttttagtagagacctggttttaccatgttggccaggctggtctcaaactcctgacctcagatgatccgcctgcctcggcctcccaaagtgccgggattagcttggctttttctcttcaaagacctaacaagaacaaagccatattttgacttgtctgtgtatgctacctaggatcattcatacctcaaatccccctcaaacacaatacaaattaatgagttggggctgggcatggtggctcacacctgtaatcctagcactttgggaggccaaggtgggcggatcacttgagatcagaagttcgaaaccagcctggccaatatggtgaaaccctgtctctaccaaaaatatgttttaaaaaattagctgggcatagtagcatgagcctgtaatcccagctactctgaggctgaggcaggataatcgcttgaacccaggaggcagaggttgcagtgagccaagattgcgccactgcactccagcctaggcagcaagagcaaaactccgtctcaaaaaataataatgataataatgagctgaatataaaccacagagtggctttgtcagcaaggcaagttgttaagaactattcagctgttacttgcataattgattattaaaagcaactgaacctatgagaggtgctatcttagccagaacagctggcttggtctctactctttcaaaaatacttaccactggggaagctggaccctgtcatctcactgtaggatgtactgcttgaaattcttgctgggtcaaaataatagctttgctgtgtaaactggacccatgcaagtttcctgttggctaacaccataagccatgaccttcagccaacggttgctaatgtcgggaagttaaaacacagtccaatgagttcaagagatctttgtgtagacccaaaatttcattcatataaactcatgagctcttcttctaggaggaacagaaaggatactaaatgaatttagcctccaaagatctggtttccagttccaagtatcatcaactagcagcaggacagaatcatgtaatttcatcaaaaaaaggggtccctatggttccctgaaactgtagaattcattgaatgtacgattctaggacctgtgacccatatgtattcgtttgctggggcctccatcaccaaataccatagattgggtggcttacacaacaagaatttattttcacacagggttggaggctggaagttcaaaatcaacgtaccagctagattggttccttctcagacctctctccttgaattgcataaataatttgttttgttttggtaagttttaaaacttgacttttttcccttcaagggcctagaaaacacatagacatattgtgacttgtgtgtatgtgtgctagctagaatcattcatactccaaatctctctcacattacagattaatgggttggatgcaaatggtatgtattgaccaacagccccagctgaggtccagttgacagtcagcatcaactaccagacatgggaatgagcaaccttcagatgatttcagcctccagttgttgagtcgcctcaaccttgaatattcccagtagagacccaggcactatgcagcaaaatcaaggcatctttttctgcatccattctgaattcctgacccatagaatctgatagcacataaactggtttctattttatgcccctaacttggggcatggttgggttttgtggtttggggttggggttggtttttgctttgttttgtttcgtttgagatagggtattgctctgtcaaccaggctggagtgcagcggcgtgatcatagctcactgcagcctcaaactcctggcgcaagcaatcctcccacctcagcctcctgagtagctgagaccacaggtgcacaccaccatgcctgcccccaaaaatgttctcatatcattgcccttccctgtatccccacctttggctgtgtaactttgcaatactcttattatgagcaaaacatatggtctcacctcttgactttggatttcgttatacgacttgctttggacaataattttaaaaaccacaaaactgacagtgtgtcatttttgagcctaggtatattagtcagagaaatagaaccagtagtatagtaaagatacacgagacagagacagggagagagccagagggaaagatagatttatcaggaggtattggctcacgtgattatggaggctgagaagtcatacaatctgccatctccaagctggagatccagaaaagtcagtggtgtcattcagtttgactcccaaaggcctgagaaccagtgtagccaatgatataaatcctcgtctagggaccagagaagataagatgatatgtcccagctcaagcaataaagcagtaaaagaggcaaaattctccttcctccatcttttgttctactcaggccctcaacagattggatgatatccacccaactggggatgatggcagcctgctttactgagtacagtgattcaaacgctaatgatacaggagctaaaaagaaattatttaggcagacagtgagggtaagagagtcctcagcagaattacccttttaacaaaaagcagcccccaaataatttcttttctaacaaagagcagcctgaaactttgagctgcaaacatagataagcaagctggaagcttgcacaggtgaatgccagcagctgtgccaatagaaaagggctacctggcatgttcaacatggaggctccatcttcccttttctttgtcaccacatgtgcagtagaaaagcaggcaacatggtgctggccaggtagagaacccatctgcataataaaacattagggtggtgaggccagcttctttgtgcactatgcaaacggcacccgtagtccaatccgggtcttcacatgctatgcaaatggcatacctggtctgaccaatccttcatgccctatgtaaatcagacatcacttcctcaagctcatctattaaacatcctgtactttgccacaaacaggaagccctgcttaggagcccctctctctctgcaggagagagatttttctctttctttcgcctattaaacctctactcttaacctcactccttgtgtgtccacatccttgatttccttggtgtgaagcagtgaaccttgggtattaccccaggcgaataatgccacttcactaatactctcaatcaggccaggcatagtggcccatgcctgtaatctcaacactttgggaggctggggcatgaggatcacttgaaccaaggagtttgagaccagactgggcaacatagcaagaccccatctctacaaaaaataaatacaaattagccaggcatggtagcacacacctgtggtcccagctatttgggagcctgaggtgggaggatcatttgaacccagaaggtcaaggctatagtgagctatgattataccattgcactccagcctgggcaacagagtgagaccctgtctcaaaagaaaacaaaggctaatggtattttttttttaattgagacagaatttctctcttattgcccaggctggagtgcaatggcacgatctcggctcactgcaacctctgcctcctgggttcaagcaattctcccacctcagcctcccgagtagctgggattacaggcatgcacaaccacgcccatctaattttgtatttttagtagagaaggggtttctccatgttggtcaggctggtcttgaattcccgacctcaggtgatccacccgcctcggcctcccaaagtgctggtattataggtgtgagccaccacacccggcaggctaatgctattaatcagaagcattgtcacagacacactcagaaaaaatgtttaatctgggcacccctttgcccagtcgagttgacataaaattaaccatcacactgggactcaagaagccttgaatgtcgccacttgcccctgccatcatcacgaggaggacatgcccagactagcccattggtcctaggaggagaatgagacacatgtggaacaaaactcagctgagatcagacaacacacagaagtaagtgaaaatagatgattgttgttttaagcccctgagttttgggatggtttgttacacagcatttttgtggcaataactaactgatacagcaagtaaggcagtgagcaagtaaggactcacaaacaatgccccaaaatgagggccccagagcaaaagtttttctctgatcttctcctgaccacctgtctctcagtcccatgctcccctgaggctagccatagaaactagaatccctcttccccaaggtgggtcatagaaccacaaccccttttttcccaaagccagccataagacctaaaaatatgactctttttctctgcctttttgtgtaaaaactggccataaagaaattatctgacccaccctgtttgactgtaggtcataagacctccattccagagagggtcttagcccatagccaggatgctgggcagttgagccccaatattggggcttagcctgggagggttcttggcttcagcctggaaaggatacaaggatgagccagaggtgttagtcacttttactgaagcagcagtgcacagcagctgtggaggtattgctccttgtggaacggggccgccccataggcagtgtacccaaagcagcagctcagaggcagtgctgcaggcatatttataacccacttttaattatgtgtaaattaaggggtggattatacaaaaatgtctagaaaagtgatggtaacttccaggtcatcagatcattgctaaggaaagggatggtaacttctaggtgttaccatggcaatggtaagttgacatggctcactagtgggcatgtcttgtggagaggtgcttttgcctcttccctgttttagctagtcttcaatctggtccagtgtccaagtcccacctccagagttgagtcctgccttctaccttacccagaaggaaataatgcttcacagaaaagccaagaagaatctagatagacagaccttgccagatttctccactcggtctattaccattagatcagaccctgtatttccaatcatgtttctgcacagctgtccatactctgtggaacctaagcataaaaacagtttccactgggcgcagtggctcatgcttgtaatcccagcactttgggaggccgagatgggtggatcacaaggtcaggagatcaagaacatcctggctaacacagtgaaaccccatctctactaaaaatacaaaaaaatagccgggcatggtggcgggcacctgtagtcccagctactcgggaggctgaggcaggagaatggtgtgaacccgggaggtggagcttgcagtgagctgagattgcaccactgcactccagcctgggcgacagagcgagactctgtctcaaaaaaaaagaaaaaaagtttccgttgtatctctgggtcttcattctgaaggcatccgtgtcatgtaaaactatgatcaaagaaatgtgtatgccttttctccaattaatctgccttcagtgacttgatttttcagtgaaacttcaaagggtgacagggaaatttctccttggcccctgcagcaggcatgcattgcttctgaacacattccagtggtgataatcgtggactcacatcttgtaaccataataggcccactgcctcatgcacacagcaagtgaatatgccaagacactgggttgcagcacagaaagacgtttaactgtagggcagctgaatgaggagttgggagggtacctcaaatccatctccccaaggagtttggggctagggttttttgtttttttttttttgctttttgttttttggttttttttttttttttgagatggagtcttgctctgtcgcccaggctggagtgcagtggcatgatctcggctcactacatcctccacctccccggttcaagtgatttactgcctcagcctcccgagtagctgggattacaggtgtgccatcatgcctggctaattttcgtatttttagtagagactgggcttcaccatgttggtcaggctggtcttgaactcctgacctcaggtgatccacccacctcagcctcccaaagtgctgggattacgggcgtgagccaccgtgcccggccggggctagggtttttaagggtgttggaggggctgaagtgtggaaatcattcgctggttgaagaatgcaggatgaagtcatgtgactggaagatgaagacactgacgtcttctgctgatcctattcctctgtgggggtcttcaaacgggttggcatcagctgttttgctggaaatcagggtctgattgtttaaggaatcctaaaacaaaagccttatgtttctaacgtcagaaattctatttaaaggaacaatggaagccaggcgtggtggctcacacctgtaatcctagcactttgggaggctgaggcgggtggatcacttgaggtcagttcaagactagcctggccaacatggtgaaaccccgtcactactaaaaatacaaaaattagtcaggtgtggtggcgggtgcctctaatcccagctactcaggaggctgaggcaggagaatcacttgaacccgggaggcagaggttgcagtgagctgagatcgtgccattgcactccagcctgggcaacatgagtgaaactccatctcaaaaaaaaataaaaaaataaaaaataaaataaaaataattaaatgtatgggacatacgtgcaattttgttacatgcatagattacatagcagtgcagtcagagcttttagggtaaccatcacctcaataacatactttgcacccattgatttttcataacccaccaccctcccaccccttctgagtctcccttgcccatcattccactctctaagtccatatgttggcatgatttagctcctgcttatgagtgagaacatgtggtatttgtgtttctatgtctaacttgtttcacttaacataatggcctctggttccatctatgtagctgcaaaagacatgattccattatttttttatcatcgaatagtattctatggtgtatatgtaccacattttcactatccaattatccatggatggacctctaggttgattcttcatctttgctattgtggatagtacttcagtaaacatacaggtgcaggtacccttttaatataatgatttattttcctttgggtagatattcagtagtgagattgctggatcaaattgtagttctatttttagttctttgagaaacctccatactcttttccatatggatctatctagatgcgcctttaattttattatttatttaaaaggaactgtcaatctgaaataagcaacagagagatcaactctctttaagaaagaattttttttttctgagatggagtcttgctctgttgcccaggctagagttcagtggcacgatctcagctcactacaacctctgcctcccaggttcaagtgactctcctgccttagtctcccaagtagctgggactacaggcgtgtgccaccatgtccggctaatttttgtatttttagtagagacggggtttcaccatgttggccaggatggtctcgaactcctgacatcgtgatctacccgtctcagtctcccaaagtgctgggattataggcgtgagccaccgttaccagacaacaaagaatttattcaggaatagcaggggattacaatctgagatccgcatgctatggcccaccgtaggagcatccaaagaggttagggcaggggaaactttcgaaagaaaaaaaagagccaggcgtggtagctcaggccttcaatcgcaatgactagggaggctaaggtgggaggatcacttaagcccaggaggtcgaggctgcagagagctataatcatgccatgtactccagccaaggtgacagaaaccctgtctctttaaaaaaaataaaatttaagtctgggcacggtggctcacacctgtaatcctagcactttgggaggccgggtgggtggatgaataggtcaggagtttgagaccagcctggccaacatggtgaaaccccgtctctactaaaaatacaaaaattagttgggcgtagtagcgcgagcctgtaatcccagctatgcaggaggctgaggcaggagaattgcttgaaccagggagacagaggttgcagtgagccgagatcgtgccattgcactcccgcctgggtgacagagcaagattctgtctcagaaaaaaaaaattaaaaaaataaaaaataataataaatttaatttaatttaatttaattttttaaaaaaagaaaaataggaaaggcccaaatgaactgttttgaaacaaagaccattggttgcaggagcttgttgcgggagtttattagttcattggtggacacggaaacacttgtcactcaggcagctgtccttgcacaagtagcttatctgggccgggcgcagtggctcacgcctgtaatcccagcactttgggaagtcgaggcgggtgggtcacgaggtcaggagttcaagaccagcctagccaatatggtgaaaccccgtctctactaaaaatacaaaaattagccaggcgtggtggcgggcacctgtagtccctgttactcgggagattgaggcaggagaatcgcttgaacccaggaggcagaggttgcagtgagctgaaattgtacctctgccctccagcctgggtgacagagtgagactccatctcaaaaataaataaataaattaattaatttatttatttatttatttatttatttatttataaaagcaagtagcttatctggaatatcacagctctgaaaaattctttggatgtccttagcatgggcatacatgctccagggctgcctcttcatggcctcctgggtccattgtgttaggatttgatgtaagtgactccattttgatgctaataacttctgcaaaaccaccctcagccaatggttctgcaacttgcacattttcacatagtaatatatagtggagatctttccaaaatattacactctacccaggtctatgtctttcttcttaataactgcattagtattgtaatactaacactgtgtcttaatttgttcaaatcaatccccaaatgagggacactttccagttttgggctatttcaaataaggctacagaaaatatcttcaacccggccgggtgtggtggctcacgcctataatcccagcactttgggaggccggggcagatggatcacctgaggtcgggagttcgagaccagcctcaccaacataatgaaaactcgtctctactaaaaagacaaaaattagccaggcatgttggcacacgccggtaatcccagctactcaggaggctgaggcaggaagaccgcttgaacccaggaggtggaggttgcagtgagccaagatcgtgccaatgcactccagcatgggtgacagagcaacactccgtctcaaaaaaaaaaaaaaaaaaaaaagataatatcttcaaccctatatcttggcaaactctctctggagagtaaatacctagcaataagatttccaggccaaagcctattagtagctatctccaatttttctccaggaagattgcattaatttatactaccatgaataatgtaggagcgcatacatttctatatatgctcagggaagtaagtcacaaaaagacaaatgttatattattccatgaggccttagagtagtgaaattcatagagacagaaagtgggatggtggttgccaggggctgggaataagggagggatgcatcaggagtgtttaatggggacagaatttcagtttcgcaaaaataaatgagttgtttcagtttgttgtttgtttgtttctttttttttctttttgagatggagtctcgctctgtcgccaagctggagtgcagtggcgcgatctcagctcactgcaacctccacctcccgagttcgagcaattctcctgcctcagcctcctgagtagctgggactacaggcgccccaccaccatgcccagctgatttttgtatttttagtagagatggggtttcaccatactggccaggctggtctcgaactcctgacctcagatgatccgctcgcctcagcctcccaaagtgctgggattacaggcgtgagctaccacgcccggtgagtcgtttcagttttacaagaagaaaagagctctggagacagatggtgttgatgattgcacaacaatgagaatgtacttaatgccactgaactgtccactttaaaatggagagggtagtaaattttatttatgtgtatttttactatgggtttttttttttttttttttttttctaaatgggtaggccgggcatggtggcttgcacctgtagtctcaggctactcaggaggatgaggccaggagttgaagaccagcctgggcaacacagtgagacactatctttataaatacatttaaaaacaaaaattagccaggcatggtggcttgtgtctgtagtctcagctacttgggaagctgtggcgggaggatcccttgagaccaggggtttgaggctgcagtgagctgtggtcgcaccactgcatctagcctggatgaaagagcaagaccctgtctctaaaaaattattaaacaaaataaaaaactttttttaattgggcaaaaaaggccaggcgcctgtaatcccagcactttgggaggccgaggcaggtggatcacctaaggtcaagagttggagaccagcatggccaacagggtgaaaccccatttctacaaaaatacaaaaattagccagcatggtggcgggtgcctgtaatctcagttactccaggaggctgaggcgggagaatcgcttgaacccgggagacagaggttgcagtgagccaagatcgcgccactgcactccagcctgggcgacagagcaagactccatttcaaaaaataataataataaaataaataaatagggcaaaaaaaaatcaagcatctctaacaactacctctgtagagctctttgctgtaaacacattgctttcttaatgcttcttgggtaatttcagcattgggttagccatttggaaagttattaataggctccatcctaactcttatcaggacaatcatctcctaattctagggcctagttgtcttttctgcctggagagctcccacagcacccacaaggcatcactaagattcacagggttaggtatctttccagcagcagatcaccacagaattttggcatcacacatattaagaaattaaagagcaaaagtgcctagtttagaaaccagtgatccgcacagaaatgcatggttcctctaaaaggcccttaattcagccaggcacagtggctcacacctgtaatcccagcactttgggaggccgaggtgggtggatcacctgaggtcaggagtttgagaccagcctggccaacatagtgaaaccccgtctctattaaaaatacaaaaattagccgggcgtggtggtacgtgcctgttatcctagctactcaggagggtgaggcaggaggatcgcttgaacctgggaagcagaggttgcagtgagccgagatggcgccactgtactccagcctggacaaaagagtgagactgtgtctcaaaaaacaaaaaccataaaaggcccacaattcaaacatctggtgtccatttaggaagccagttggtcatagctgggaaggttttctcccattcgatcgtagggtctctccaagtgcacattccccacaaggacatagccataaagaatacatgagcaaagtaaaagagaatcctgggaaaatctttcgtttttaacaatacttatttcattatggaagtaacatactcatcagttaaaaacttgaagatgggcagggcttggtggctcatgcctgtaatcccagcactttgggaggccgaggcaggtggaacacatgaggtcaggagttcgagaccagcctggccaacagtgaaaccccatctctactaaaaatacaaaaattagccaggtatggtggcacacacctgtagtcccagctactcgggaggctgaggcgggagaatcgcttgaacctggggggcagaggttgcagtgagctgagatgaggccattgccctccaatgtgggcaacagagcgagactccatctcaaaaaaaagaacaacttgaagacgtagacaaataaaatcacccattgtgataaatagatagtttgggggggttttggttttgttgttattgttgtttcagagacagtgtctcactctgtcacccaggctggagtgcaatggtgcaatcttggctcactgcaacccccacctcccgggctcaagcaattgtcccacctcagccccccaagtagctgggattacaggtgcacaccatcatgcctggctaatttttatatttttagtagacatggggttttgccacactgcccaggctggtcttgaactcaagaccgctcaagccatcttcttgactccgcttcccaaaatgctggaattacaggcatgagtgagccactgcgtccggcctagatagtgtttttcaattgtgcagcatccatatttcctttttttcctgaaagcaatggcctgattctcccttggaaaaccacccacccccttgactttaccttcctccttccgtgtggctggacaagactgattgcatctctagctcctggggtaggctttccccttggaagagtcccatcccctgtcctctgagattggttgaagggtaaacgacccacactgagccaatcagatagtgccaggattttgaatgaagctggcaggaaagagatgagctttttccatcggtgtggataaacttgaaaaaactaagcctggaatgatcggggtctatgatgccaccatgaggggagagcctgcctgagaatgaaatctgagtggagaaatacagacagtgtcctgacaatgtccttcagtcatctgaatccaactatgctcgaagctaaatctatccctgaacttttcagcaatgggagcccattgattccactgttgttatttttgttgaaggcaatatgatttctatttctgatctgggcaaccaacccatccatcttccaaacccaaccaaggcatttttctctgaagtctttttttttttttttcctttgcactggtatttgaactttttatgtatttgagaccacagtatttctgtatctatgtatagctatagattatattagttggtctttgcaacaacaattctacataatggactaatctcaaaacttctttttcttctttacaggtctgggagtcagcaggttttgtagcaggttcagatttgccatcagcactaccatgccctgtgatcaaagtcaatggaaaaagaacccaattcaggcaggactaccaatgtattcggttggtggaaaattaattgtggtttttgccattgaaagtaacagcccagactcttcaggagtgaaggtttgggtcaccctgttaccggaaaggggtccctatccagaccccaagagagggctcttggatctcacacaagagaattcagggtgagtccacagagccaagtgaaagcaagtttattaagaaagtgaaggaataggctgggcaaggtggctcacaactgtaatctcagcactctgggagtccaaggtgggtggatcacctgaggtcaggagtttgagaccagcctgaccaacatggagaaaccccatctctactaaaaatacaaaaattagagacaggagtttcactatgttgcccaggctggtcttgaactcctggcctcaagcaatcctcccaccttggcctccaaagccaccatgcccagcctctgaggagctttataatcacacacacacagagatgctccatcctgcatggggctgccctgattcctgttaaaaccactagcctacagatacagtgtttctttttttattttatttatttatttatttttttagatggagtcttactctgtcacccaggctggagtgcagtggcactatctcagctcactgcaacctctaactcccagggttcaagccattctcatgcctcagcctcctgagtagctgggactacaggcgtgcgccaccacacccggcaaatttttgtatttttagtagagatgggatttcgccatgttggccagtctggtctcgaactgctgacctcaagtgatccgcctgcctcggcctcccaaagtgctgggattacaggcatgagccacagcgcccggcccagatacagtgtttctaacagtgtgtctcatcacccttagatatgctgggtggtgggaaggcagagaaggaaggacaaaagccactgcttatttcaattacctacctttcaccacattggtgagggggggattcttgccctagtgttatgcagatggccaaacacatgcctgacatgggacagatgagactgacagccatttattagttatttacactcactgcctggagaaaggagacactgttgaaactgcctttgcaaaattatgactgagacagtcaaagaaatctaactgaatcgactccatcttgcttctaacctccaagctgtccttgttcattccttggcgtaggctggactaactttgggagaaactcagtttatagtttatagtttaaaacaaagatgacagactgggcacggtggctcacgcctgtaatcccagcactttgggaggccgaggcaggcagattacctgaggtcaggagttcgagaccagcctggccaacatggcgaaaccccgtctctactaaaaattaaaaaaaaaagaaaattagctgggcgtggtggcgggtgcatgtagtcccagctactcaggaggctgaggcagaacaattgcttgaacccgggaggtggaggttgcagtgagctgagattgcgccactgcactccagcctggcaacagagcaagactctgtctcaaaaaaataaataaaataaaataaactctgctccctcactgcactccagcctgggtaacagagggagactccatctctgaaaaaagagaaaaaaacaaaaaactctgctttttgaatatttggggagactgattttagtcataataaaactctggtctcccgcacggccagctctgtgtgaattactctttctctattgcaattcccctgtcttgataaatcagacagcagggaactgaaaccctctgctcagagataaacaggaactgtacctggtccatttaataaagagagctgcttggctttggggtaggggtggtaacttctccatcagggcagagtagggaggggactttgggatcagtcatttgaagccctcctggtttcaccagctgtcaaggcagcacataacattgagccttaattttaggctttgcaccacgtcgcttctgggcattattttttagcaagtgttatggggtgacagaaaggaaagataaaatattctcccagagggacgttattcataatcgctgtgagttgtacagaaatcagtatacggtgtctttttttttttttttttcttgtccaaggaaactaaactccaaacgaagtgaaataaagttggagagaactttaacctcgctgccatggaaaccacatttctcactcatggggcaaagagggtttatgtgaggatctcctgagtcgataaggtatctggacattggcaattccagatatttgattaacaagcaggaaatcgtaaggatttcctaagattgactagccgaggaagggaagcttgggataaaagaagtgcttctttcaggagaggcatttcctaccccttcattctaaaccagggctcctggccgggcccagtggctcacgcctgtaatcccagcactctgggaggccgagacaggtggaccacctgaggtcaggagttcaagaccagcctggccaacatggcaaaaccccatctctactaaaaatacaaaaaattagccaggcatggtggtgggtgcctgtgatttcagctacttgggaggctgaggccggagaatcacttgaacccaggaagcagaggttgcagcgtgccgagatcgcgccattgcactccagcctgggtgacagagcgagactccatctcaaaaaacgaagaaacaaacaaacaaaaaaagattctcataaggatcacgcatcctagatccctcgcatgtgcagttcacaataggattcgtgctcctgtgagaatctaatgctgccactgatctgacaggaggcggggctcaggcggtgatgcgagcaatggggagcagccgtaaatacagatgaagcttcgctcattcggctgcccctcacctcctgctgtgtggcccggtttctaacaggccactgttaccggtccatggcctggggattgggaacccctggtgtacgggtggcagtgaccacctctcagccacagggtgaccccacggaatttgtgctgttttcctctaaacacaacaattagaactccccaggggaaacgttcttgggtaatgccctgaaccccagtaagggccttggcctccaggtcccccgcctcacacttcccccatcttctggttgatcttgcacatcccaaatggctcccctcttcctattgccctgcaaggcactctgtcctcctctctctgggatttgtgagtaataaaactgtttctgttatctgttatttcatgtgttttgttgagttaccttttttttttttttttttttttttttttgagactgagtctcactccatcacccaggctggagtgcagtggtgcgatctcagctcactgcaacctccgcctcctgggttcaagcgattctcgtgcctcagcctcccgagtagctgggattacaggtgcacaccacgacacctggggggcaagatcattcgagaagctttacatcttgtaggactggccctgactccaggagggtttccttctgccagtttagttatgcagcaggaggtgcttggcgtatctccccagtgcagtcttccctatgtcatctgagccccaaagcaatgtgccctgggcctttagtctctcaaagtcttaggaaagtagctttctcttcatctctatgtagtctccaaaccagttcaaatatgctgctgggttactcaggaggctgaggcaggagaatcgcttgaacccaggaggcagaggttgcagtgagccgagatggcaccattgcactccagcctgggcgatggagcgagactccgtctcaaaaaaaaaaaaaaaatgctgctgggacaagcatccaaaccaaccctcccttttctccatagcctacaagatacatgtacaaaataacatctccctccaccttcaaacgaaacccaaaagccctcgtgggaagacgcacagcacgcgggattctcaccaccagatgcctagcatctgagatcaatgaatgctaaggacaggaatcacactcatgtcaggaggcaccaacaagtcttgatgcagcctttagtaaaacctggggacgagaactttcattttgtgagtttcctttttcatgtggattgcattgtctctactgccttctttgctttctctctacatccttgtgaagcgaagttcctttggaaaaattccagctggccgggcatggtggttcatgcctgtaatcccagaactttgggagaccaaggcgggtggatcatttgaggtcaggagtttgagaccaccctggccaacatggtgacacctgtctcaataaaaatacaaaatttagcaggcgtggaatcccagctactcgggagggtgagatatgaggatcgcttgaatctgggaggctgaggctgccatgagccagatcacgccactgcactgcagcctgggaaacagagggagacactgttcaaggcctatcttttattattattattatttttgagatggagtcttgctctgtcacccaggctggagtgcagtggcaacctctgcctcccgggttcaagccatcctcccacctcagtctcacaagtagctaggactatatgtgacaccaccacgccccactaattttttttttatttgtaccgacaaggtctcactatgttacccaggctggtatcaaactcctggactcaaatgatccagcctgcgttggcctccctaagtactgggattgcaggcatgagccagcacaccctcccttgctttagttcttaaaagagactctcgcacattggcttcaggctcagctggatccaggtccttgaacaggttcaggaatctggaacctgtctctttcatttatatatttatttgagacagggtctcacactgtcgcccgggctggagtgcagtggcacgatcatggctcactgcaacctcagtctcctgggctcaagtgatcctcctacttcagcctcccaagtagctaagaccacaggtgtgtgccaccatgcctggcttaattttttattcacttatttatttatttatttatttgttctgagacagagtctcgctctgttgttgcccaggctggaatgcagtggcacgatcttggctcactgcagcctccacctcccaggttcaagcgattgtcctgactcaggctcccaagtagctgggactacaggcatgtgccaccatgcccagctaaattttttgtatttttagtagaggcggcatttcgccgtgttgattaggctggtctcgaactcctgaactccaatgatccacccacctcagtctcccaaagtgctgagattacaagcatgagccactgtgcctggccaattttttttattttttgtagagacacagtctcactatgttgcccaggctggtctcgaactcctggcctcaggagatcctgccaccgcttcccaaagtgctgggattacaggcataaaacactccgcccagtccctggtctcctttgtgtcggcttcatcaactgtcagttccgttctccagggttagcaattctaacagaagtcccgggatgatgtctcattggctcatcttgagatatgtggttatgactgaactacaagcagagggatgagattggccactctgggtcatgtgccccattttctttctttttttttttttttttgagacgaagtcttcctctgtcgcccaggctggtgtacaatgacgtgatctcggctcactgcaacctccacctcctgggttccagagattctcctgcctcagcctcctgagtagctgggattacaggtacatgccaccatgccccgctagttttttgttttttggttttttttttttgagacagagtctcactctgtcgcccaggttgaagtacagtggtgcaaccttcacctccccggttcaagcgattctcccacctcagccttctaagtagcttggactacaggcacccaccaccacacctagctaatttttgtatttttagtagagacagggtttcaccatgttggccaggatggtctcgatctattgacatcatgatccgcctgcctcagcctgaagtgctaggattacaggcttgagccaccacacccagcccacgcccagctaatttttgtatttttagcagagacagggtttcaccacattgcccaggttggtctcgaactcccgacctcaggtgctctgcccacctcagcctcccaaagtgctgggattacaggcgtgagccaccacgcctggccctacatgccccattctaaagctggcccctttccaagcacatggatgcaaatgggataatggctcccccagggaaaatcagaagaaagaggcatggatgctgcacccgcaaatgcagctgatacccagtccacctacactaagcaagttattaaggcttactaaaacatagtgttcgtacattcagaatagaaagttactgtaatttattgagcactctattttggtattccacctagaagcctggcagacacacaatacctcccagcattgcacacaagtgtacactgatagtataaatttccataatttcctggaggaacattttgtctttgtgttatcttgaattggccacggttttcaaccgctgttctttttgcttagctaatgataaatcactgtttagcttgttattagcaatttaatttgttgtgggttgtttggcaaattctacagtgtttaataatactcatttgcatcagcagtatttttggcctataattgttcaataaatagactttaagtcatgtatgcattgagcaaaaatagaaatcatctgtactcttattgcttaagcagatgtacccacaattccccaacttttagaaagcttttaggatgacattccatttttatcacctacttgtttttctgctggaaagtgggaatgggggtgaagccttaattccctcctaattgggctgggggaaaaaatttagagctgataacttaagagaactttgcatatactggttttagtaccttggaaagtttatgtggtagagtggcagagtatatgttttaaaaactggtcttaggccgggcgtggtggctcatgcccggcactttgggaggctgaggcaggtggattacgaggtcaggagttcgagaccagcctggccaacatggtgaaaccccgtttctactaaaaatataaaaattagtcggatatggtggtgtgtacctgcaatcccagctatgcaggaggctgaggcaggagaattgcttgaacccaggaggcggaggttgcagtgagccgagatcgtgccattgtacttcagcctgggcgacaagagcaacacttcgtctcaaaaaaaaaaaaaatggtcttaaattgtggacggtcttgaaaacttgatctaggacaaaggttggcaaatttcttctaaagtggatcagataataaatctttttggttttgcaggctctagtgtctctgtcacaataactcaaccctgatgctgcagtacaaaaatagccagaggcaatacatacgcaaatgggcatggcagtattccaaaaactctttaataacaaaaacaggcagccaaccaaatttggcccgtgggccataatttgtcaaaccctggtcaaggagtttggacttctttccattggatcattaaagatgttgcaggtgtgaatttcagttcccaatttagagacttaagagatgtaatcttatttttgttttttgtgcatttttttttgtttgtttgttttgagagcctcgcactgtcgcccaggctggagtgcaatggcgtgatctcggctcactgcaacctctgcctcccgggttcaagcaattctcctgcctcagcctcctgagcagctgggattacaggtgcccaccaccttgcccagctaattttttgtatttttagtagagacgaggtttcaccatgttggccgggctagtctcaaactcctgatctcgtgatccgcccacctcggcctcccaaagcactgggagtacaggcatgagccacctcacccggccaccttatttttctagaactgaaagtgatcactagttcaagtcctcattcttcaagagtggtgaaaagttcatctcaggtcaactcggagtgcttctacccttttccttggtaccttggtgctgcatcttatttccctagggcttggatggtacctagatgtgggagacagaagggtgagataaattgccaagtcattgcctccttacaatggcctcatggagggttcctcagaattgtgatgcttgattattggctgccatgagttgaactgagtcccccaaaaagatatgtttaagtcttaacccctagtacctcagaatatgatctgattaaggttgttacagatggaattagttaagatgaggttatatcgcagtacggcaggcccttaatccaatataactaatgtccttttaagaaaaagaggctgggcgcggtggctcacgcctgtaatcccagcactttgggaggccgaggaggatggatcacctgaggtcaggagttcaagaccagcctggccaacatggtgaaaccccgtctctactaaaaataaaaacattagccgggctcggtggcatgcacctgtagtcccagctactaggggctgaggcaggagaatcgcttgaactggggaggtggaggttgcaataagcggagatcacgccactacactccagcctgggtgatagcacaagactctgtctcagaaaaaagaaaaagagacgagacatagagacacaagggaggaacaccatgtaacaaggcagagatccatgtgctgcagctgaaagccaaggaatgccaaggtgaactggaggcaaaccaccagaagccaggaagtggcaaagaagatatctcccctacaggttttagggaacgtagccctacaacaccttgatgtcagacttctagcctccagaagtgtgcggtggtatattttgttgttttaagcacccagtttgtgctacttagttacagcagtccttggaaattaacacatcgcccaatggtattcactcctagatccactcttgttctcaccacttcagatctcctagatgtctgagccacatccttcgtcctaagtccattttcttctttcaaagtaatagaatggtggccaggaacatggctgcctaggttgacatttcccagcctcctttgcagtcagatggagtcacatgactgagttctcaccaatggggtgtgagaggaagtgacatgttccacttcctggtttgagtcttatgacatcataagcacttccttttttttttttttttttttttttttgagacagaattttgctctgtcgcccaggctggagtgcaatcgtgtgatctcagctgactgcaacctctgcctcccaggttcaaaggactctactgcctcagcctccctagtagctgggattacaggcatgtgccaccacgcccagctaattctgtatttttagtagagatgagttttctccctgttggtcaggctggtctcgaactcctgacctcaggtgatccacccactttggcctcccaaagtgctgagattacaggcatgagccaccgtgcccaggcagcactttcttcatagtctcttcctccttcccattggctggaattaagacttagtggggatccagcattgaccaggcagacaaagcaatgctgcacaacaggagattgtaaacatggctgcacattagaatctcctgggaactttttaagaaaaaagaaaagaaaaaagataaaaaccatgtccaggccctatcccagacaaaataaatcaaaatctctgaaggtggggcccaggtatcagtgtttttttacagcttccagagtgattccaaaatgtagctacattgaagacaattgccttagagaagggtaaactgagaacaggagattggaaacctgagtgacttccaggagctgacttgctaacacggaccatttataccaggttaccaggtgagggactctgacttccccagaaaacagaccactcacttttataacattaacttccaaaacaaaagcaactttgataaactcaaaaactgcatattagtttatctacaactgagatggggaagatttcttttttttttttttttgaaacagagtctcgctctgtggtacaggctagagtgcagtggcacaatctcagctcactgcaacctgcacctctcggattcaagtgattctcctgtctcagcctcccaagtagctgggattacaggcacacactgccacgcctggttaatttttgcatttttagtagagacagggtttcaccatgttgaccagggtggtctcgaactcctgacctcaggtaatccgcctgccttggcctctcaaagtgctgagatggggaagatttctgatggagcagggttttatttcatggacttggaagaatttttttgtttttttgagacagtttcgctcttgttgcccaggctggagtacagtggcgcgatctcggattactgcaacctccgccttccgggttcaagtgattctcctgcctcagcctcctgagtggctgagattacaagcattggccaccacgcccgcctaattttttgtatttttagtagaaacggggtttcatcaggttggccaggctggtctccagctgctgaccttaggtgattcacctgccttggcctcccaaagtgctgggattacaggcgtgagccaccacgcccagctggaagaactcttaatcccacccctgaccattccattcctcttatagttcatgagatctctgctcctctgtcctatctacttccactgcattttcaaacaagtcgttcaattttcaatctttctttatttgtttttgttttgttttgagtgagagtctcgctctgtcacccaggctggagtgcagtggcgtgaccttggctcactacaacctccacctcccgggttcaaatgattctcctgcctcagcctcccgagcagctgggactacaggcgcccaccaccacgcccggctatttttttgtatttgtagtagagatggggtttcactatgttggccaggctggtctcgaactcctgacctcgtgatttgtccacctcggcctcctaaagtgctgggattacaggcatgagccaccccgcccagcctcaattttcattatttcaaataacatttattgagtgcttactgtgtaccaggtattgtactgagcattttccttgtaatagtggatttaatcctcacatactgcagtgcagtaggcattgtcattactacattctacagataagaaactgtggttcagaggtacaatttaccaagttctatctaggtcacggtctatgctttttaattaagtatactgtcctatattccttctgaatgttattaacaaattttgttaataaaatgtcactttttttccttagagtcaaggttttgatctgtcacccaggctggagtgcagtggtgtgatcatagctcactgccatcttgaactcccaggctcaagtggtcctcccacctcggcctcccaagtagctgaggttacaggcatgcatcaccatgccaagctaatttttaaattttttgtagagatggggtctcactgtcttgcccaggctggtcttaaactcctgggctcaagcgatcctccagcctcagcctcccaaaatgctgggattactggcatgaaccaccgcacccagccaaaatgtcacattttatatgcccaatatgctttcagaaatgttaggtgcagtacacattaagtatggaagtcaatgaatttaagactttaaaagactgtatagatagtttttaatttggctccttttttttctttttgagacagagtcttgctctgtcacccaggctggagtacagtggcatgatctcaactctacaacctctgcctcctgggttcaagcaattctctagcctcagtctcccaagtagctgggattacaggcatgtgccaccacgcctggctaatttttagtacagacggggttttactatgttggccaggctggtctcgaactcctgacctcgtgatctgcccaccttggcctcccaaagtgctgcagttacaggagtgagctactgcacctggccaatttggctcctttcttaaaggtgagaaaactgagactgcattcacctatttgtcattcattcaacaaatgcttactggatattgacaagggctcactgttattgagagctaactatatgtcaggcactgttctggaccgttttcagatacttactcttgaaaccctcaaacacccttgtgatgtagccaactaatgggtaacatctctagttaccctatttcatgaatgaggaatccaagatacaaaaaagtaaagtccacactaatagtgggtggtggagaaagaattcaaacacaggaatctgataccacaggcacaatgctacattagctcataacttaaaagtcaccaaacacatgagaagctgctttgaaagacagaagaaataatcaaaaggagaagtaaatccccttccagtgtctgcagatactgggattgtcagatacagaagagtagtcatgagagaaatgactggagaaatgaaagacggctggacgtggtggctcaggcctgtaatcccagcaggtgcgtcacctgaggtcaagagttcgagaccagcctggccaacatgatgaaatcctgtctctactaagattgcaaaaattacccgggtgtggtggtgcatgcctgtaatcccagctactcgagaagctgaggcaggagaattgcttgaacccaggaggcagaggttgcagtgagccaagatcacaccactgcacttcagcctgggcaacagagcgagactctgtccaaagaaaggaaggaaggaagggagggagggagggggggagagagacaggaaggaaggaaggaagggagggagggaaggaaggaaggaaggaagggagagagagaaagaaaggaaggaaagaggcagtcataaaggtgatcaaagaacaagaaactttggggaacaaatagatgctttccaatataacataaaaatgaaaaatataatcgctgaaataaaaactcaactgacaaaaatcagcttaaacacaacccaagagtaaatgagtgaactcaaagatgtagctgaagaaataaccttgaatgtaacacaaagagacaagagatataaaatatgaaacaggctgggcgcagtggtctgtaatctcagcactttgggaggctgaggcaggaggattgcttgagcccaggagtttgagactagcctgggcaacaaagtaacaaagtaagatctcatttctacaaaaactaaaaaaaaaaaaaaaggtcgggcatggttgcatgcacctatggtctcagctacacaggaggctgaggcaggaggattgcttgagcccaggaggtcaaggctgcggtggaccatgatgatcacaccactgcactccagcctgagtgacagcatgagaccctgtctcaaaaaaacaataagtaaatgagaataaaaaataaaataaaatatgaaacagtaagagagatgaagggtaggagtattaaatttggctaggtgaggtgactcacacctgtaatcccagctctctgggaggcaggccaaggtgggtggatcacatgaggccaggagttagagaccagcctggccaacatggcgaaacccctgtctctactaaaactacaaaaattagctgggcatggtggcacacgcccataatctcagctactggagaggctgaagcaggagaatcacttgaacccggaaggcagaggttgcagtgagccgagagcatgccactgcactccagcctgggtaacagagcgactctgtcttgagaaaaaaaaaaaattaaattctagatgcacttaatcaaacatcccgaagaatcaaatagagaaaatggaggcgaggcaagatttaaagagataagacctgcaaattttctaaaattgatgacaaaccgaagtccacagactaaagacgcacagagtgaagatccaaccaggataaataaaaagaaatatatgcctaggcccatcttggtgaaacaaaacaccaaagatagacagaagatcttaacagcagccaggaagaaagtagacatcatctacaaaggcctggccatttcaacccaggtgactttccatcagtaatagtggaagacggaaggcattggaatgataccttgacataattggagcaaatgccattctccattcaagacccttgacagctttggtgccgtgagggttgaggaaggtcaccagtgaggaccactgggccctggcatccgaaaaagcaggtcactcatggaaagcactagaagcagagacggtagcaaggagactgccattgggactttattttttatttttatttatttattttttgagacaggatctcactgcgtcccccaggctggagtgcagtggcaacaatcttggctcaccgcaatctccgcctcccaggttcaagcgattctcctgcctccccagtagctgggattacaggtgcccgccaccatgccagggttctgttttgttttgttttttgagacgcagtcttgctttgtcacccaggctgtactataatggcactaatggcacaatctcagctcactgcaacctcctcctcccaggttcaactgattctcccccctcagcctcccaagtagctgggattacaggcacctgcgatcatgcccagctaatttttgtatttctattagagacggggtttcactatgttggccaggctggtctcaaactcctgacctcaggtgatccacccgtctcggcctcccaaaatgctgggattacaggcgtgagccactgtacccagccttgccattgggactttaacagcagcaaatctgttatgagcaaagtttttcctggacacaaatgaaacatccccccgcccgccacaccgcagaatcctgcaacatagtgtgggaagcttgtagcgaggagatgttgaggtcctccatgtggaaaataatgaggtattgaaattcaggcattaatgttaatggggccccatttgtatgcagtctaattgggactggacttttttgcttttagggtcgactaactgaccaataaattctaaattttgtttacaaactttggctcaggttaagctctgaatccatttgtctcagatacactctattgcccagatagtaagtgaatgtattagcatataaatgagattttgaaacaaagacatcaagatattgaagaagctgcatgcggtggtgcattcctgtagttccagctactcagaatgctgaggtgggaagatcacttgagcccaagaagtggacgctgcagtgggctgtgactgcaccactgcacttcagcctgggcgacagagccagaccctgtctcaaaaaaaaaaaaactgaacaaagagattcaagaaaacaatggctcaaataagaaacaagtttaactctctctcacctaagaatccagaaggaggcagatggtctgacacaagcagggggctccactgcacaaagtcacccagaaacccagctctttccatctcgctgatccattatatccaggatatgttttcttccatatgccaccctggctcacgacagtgtccttattggagtcatcatgaaagtagtaaagagaaaaagtagagagcaagcatttcattttatggaagcaacacagaagttacattgtttttccactcatattctattgctgggaccttgttcacatggccttatatagctgcaagagaagctgggaaatgtagtctctaactgggcaaccatgtgccctgctgatactcaagggagttctattcccaaaagtaggaagaggagaggggtttctgggacagatgacaatgtctgccatgaggggacaggagatgaaaaagaggatgccacagttaactcacaattatttttaagaaatagtaataatagctaccacttatgtacaatgtaccaggcactattctaagcatttgtatcaactcctttaatcctcagctctctgaggtagttactattattaatcccattttgtaaacgagaaaaagacataaataatgtgacacatgtctaataagtggtataactagagcgttaaaactctttagtcaaagccttaagaaaattcattttcaaacagtgactttggtcaatgcagtagctcgcacctgtaatcccagctgctcaggaggctgaggtgggaggatcacttgaggtcaggaatttaaaaccatcctgggcaacatagctagaccccatctctaaaaataatcttaaaaattagctgggcatgggggcttgcacctgttagtcctagctactcagtaggctgaggcaggaggattactttagtgcaggagtttgatgctgcaatgagttatgatcatgtcactgcactccagcctgggcaatggaccaagacctcatctcttaaaaaaaaaaaagtgattttgcattcacctataaagtaattatttgagggaatgcaaagaacgtttttaggactatgaaaaagaaagctagcaaagcaactgatttctagtttagtgcaaggaaggcaaaccatttactgaatagagaaaaaaatattctctctagtttatctctaaaagtaaatgctttgagaacataatctatttgcccttgggatgaagtcagagcaatttcaatctcaggatccaatctttctgccaaatatggtctctgttactaaccctcttgactagaaatctttgggagccaaagaatattcctttcctttccctaatatacagatgctgagagcaaacgtctgtctcctgggaatcctggcaggaaaaaatctaagattttttttttttttttttttttgccaccaagctactttgggaattaagatcattaaagactaatagcagctgctacgtacttagcaaatggagctaatcagacttccacaagtggggaagtatctaaatacaccactgctgctaaatcccagtcttgactgtggtgatatccattcccctcctgaccaggtaattagaaagaactggataatcactttagcaaaatagcagatgcagtgatatatcacacctgtccacaagctgtgtggcaggataaaaggtgaaaagtgcctctgagctgagaaatatcacagtaaaaatgatgcatcatagaagctgaaattcacagagccagcccctgtaagaagtacctgacacaggagcagtggagactcacagagtgggtatgttgcagacccaccaggtttgtatgcctgctgtgcagtaacataccaatcaaccaagacagcagggtttgcagcagagaaagagtttagtgctcacagggcatctgagtgaggagaaaagaggaacccccaaatctgtctccccaaggagttctgagctggggttttaagaggatcatggagggcaaggactggaaaattgagtctgattggttggggtaaggaggatgaaatcatcaagatatggaaactgcattctttggtaagtcagctctttgtggggtccttcagaccagctgacatcagtagtttcaccggccgggcacggtggctcacacctgtaatcccagtactttgagaggccaaggcaggcggatcacctgaggtcgggagttcgagaccagcctgaccaacatggagaaaccccatctctactaaaaatacaaaattagctaggtgtggtggtgcatacctgtagttccagctactcaggaggctgaggcaggagaatcgcttgaacccaggaggcggaggttgcagtgagccgagatcacgccattgcactccaggcagggcaacaagaacaaaactccatctcaaaaaaaaaaaaaagaggtagtagtttcactgatattcagggtctgaaagaacatctcaaatggaaaacttaatgcctcacaatgcttaggatgacatctatagagcagttaagggaaactataatcttgtaacagggtctacctgattctgatgcaataggaagcaaacagctataaggaagcaggccagagagcaagctgacttaatgattaatgctgaatgtgctgcaagcttggcttattttcacttctccccctccctttctccctgattaatttcataaagtttataggacgatttcaggcacagggatgcctgattggaaactacgtctcccagcctctcttggggctgggtgtagccagatgagtaaggtcttgctgatgcagggcaggttcttggctttgctcaagaaggaattcaagagtgagccggtggttggagaaagcagctttactgaggtagcagcagtgttacagctctgtgactactcctgctccccacaggcattgcaccaagagtagtagtgatctgcggtcatatttatacccaattttttttttttttgagatggagtctcactctgtcgcccaggctggagtgcagtggtgagatcttggctcactgcaagctccatctcccaggttcatgccattctcctgcctcaatctcccgagtagctgggactacaggcgcctgcaaccacgcccggctaattttttgtatttttagtagagacggggtttcaccgtgttagccaggacggtctcgatcttctgacctcatgattcacccgcatcagcctcccaaagtgttgggattacaggcgtgagccaccgcgcctgacctatacccactttcaatacatgttagttaaaagccagattattcagaaatagctagaaaatgggcggtaactttgggtgttgccatggcaaggggtggtagtttggggcgttgctatggcaatggtaaactctcatggtgctggtgggggtgtcttatggtgatgggcaacgaagaggtgcttttggtgcctttaatctgggccagagatgagtcctgcctgcctcctttcttattgccagtggaatgtgagccaaagtgatgagttgcttgcccaagtactggaacatagatgtgcctgagacccagtgtcaacctattaaatgaggacaataccctaagtaatgacctagcagcaagatgagaggaagcaggatcccaaatgactgtgtgtaaaacagctcttccctgccaacctggactgctcatggccaaatattgtgtgaaagaggggtaatcatctgtcctccacaagccactgtgtctgggagtccttttggggtttttttgtttgtttgcttgttttgttttgttttgagacagagtctcgctctgtttcctaggctggagtgcagcggcatgatctcagctcactgcaacctctgcctcccaggctcaagcgattctcctgcctcagcctcccgagtagctgagattacaggcctgcgccaccacgcccagctaatttttgtatttttagtagagacaaggtttcaccatgttggccaggctggtctcgaactcctgacctcaggtgatccaccctcctcagcctcccaaagtactgggattccaggcgtgagccaccgcgcccaggtttgttatagcttcttaacctttgccctaacacagtagactagttcatttaatcttcacaacaacccagggaactggttactattattattcccatttcacaaataagggaactgagactcagagaaagttaaatatttcacccaccatcccaaaatcaacaaatgatgcaaacagaagtggaagccaagtttcaagcccatggagaaggttctgattcagtaggtcctagacagaggctgaaattctgcatttctagaaagctcccagctgaggctgggaggtccatggattataatttgaggagcaaggatttaaaccactcccctcccttgtctcccctaagagttagaaactgactgtccaagcctgagcagtgtagtgagacctcatctcaacaaattttttttaattagctgggcatgatggtgcactcctgtaatctcagctacttaggaggctgaggtgggaggatcacttgagcccaggaggtcaaggctgcagtgagccatgattgtaacactgcactccagcctagctaacagagtgagaccctacctcaaaacaaaaaataaaaaaaagaaagaaactggctgggcgcggtagctcacgcctgtaatcccagcactttgggaggccgaggcgggtggatcacctgaggtcaggagtttgagaccagcctggccaacatggcaaaacccatctctactaaaaatacaaaaagtatctgggcgtggtcgtgcacacctgtagtcccagctactcgggaggctgaggcaggagtactgcttgaacctgggaggcggcagttgctgtaagccaagatcattccattgcactccagcctgggtgacagagtgagactccgtctcagaaaaaaaagaaactgtccagattcccaagttctagtctcaggtatctaaatgacaaccaataatagcttcctaaaaatgttttgccctttctgtactgttcccttctcctggaaattagttgaattcatatattcagttttcttaataggcaaattctctttcaagctttgaatttctcctaggcaggtgtcacgcttccaaggagcagttaccatgaaattgtgaaatatgatgccactttctggagatcttgtgacagctgtctcaccctctatcttttcttactctggctctgtaacccaaaataacattcaatgaggcttcttgggaaaggtgacatgtcattctgtgctgtttcaacaggaaacattgactacaataagaaacaccctcagcctggagagatattataatcaacagcaaaaaaccatttcagcacccaaaacacttgggaaatgtatccttgttgcaaacccaacttcagcctgaaaaatcatcgcattctaaaagtaaaccaaaggctggttccggtggctcatacctgtaatcccagcactttgggaggccaaggcaggaagatcacttgaggccaggagtttgagacaaccctaggcaacacaggaagatcccatctctgaagaaaaaaaaaaagaaagaaagaaaaattaaggctgggcgcggttgcccatgcctgtaatctcagcacttgggaggccgaggcaggcagatcacttgaggccaggaattcgagaccagcctggccaacatggggaaaccctgtctctactaaaaatacaaaattagccggcatggtggtgtgcacctgtagcttcagctactctggaggctgaggaagaatcacttgagcctgagaagtggaggttgcaatgagctgagattgtgccactgcactccagcctgggtgacagagtgagactgcctcaaaaaaaaaaaaaattaaaacaattagcatggtggcatgtgcctgtagtcctaactattcaagacaagaggattgctggagcccaggagttcaaagttacagtgggctacgatcaagccactgcactccagcctgggctgcagaacaagaccctgtctcaaaaaaaaaaaaaaaaaaaaaaggaaggagccaggggagcttattggtgactctgagatgtccaaggataaatctggcttcaaacatggctagatccagggctgccaaagataatattaggactcacgctctctctccatctgtcagttctgccacccacaggatctccccctctcccgtaaccaccatgagagctatggtggataggatcgcattttttatttatttatttatgagacagagtctcgctctgtcccccaggctggagtgcagtggtgctatctcggctcactgcaacctccgcctcccggatttaagcgattctcctgcctcagcctcccgagtagctgggattacaggcacccaccatcaatcctggctaatttttgtatttttagtagagacggggtttcaccatgttggccagtctggtctcgaactcctgacctcaggtgatccacccgccttggcctcccaaagtgctgggattacaggtgtgagccaccacgcctggccagattgcattttcagaaatgcagtacctctgcactctgcatgtgactgtgccctcccaccgtgggtagagtatatttccccaccacactgatactggggttggtcatgtgacttcctctggcatatgggatgtcagcagatgtgaacaacagatgtaaatgtgcccgcagggcttagctgagctctttcactcaagtattctgccaggagaagagcatgccccagggaattgcttacccttatcctgagaattatcaaatgtggagcagagtaaacccaaccttggatttggcaccgacagaacccaaccaatccaacagcctgaagcagagtcatttatccaagtcttgaatggaggatcagctaagccaaactggacctttagaaccctgagcataagaataaaggcttattgtgaggaagcaagtctgagttttgggtggtttgttacatggcattattatagtaacagctgtaatcccagcattttgggaggccaaggcaggaagattactcgaggccaggagtttgagacaaccctaggcaacacaggaagactccatctctgcaaaaataaaaataaaaaaaaattaagcccgggcggcccatgcctgtaatcccagcacttgggaggctgaggcagggcgggtcacttgaggccaggaattccagaccagcctggccaacacggggaaaccctgtctctactaaaaatacaaaaattagccggcatggtggtgtgcacctgcagtctcagctactccagaggctgaggcagaagaattgagattgtgccactgcactccagcctgggagacagagagagactgtctcaaaaaaaaaaaaaaattaaaacaattagcctggcatggtggcatgtgcctgtagtcctaactgagtcattatccacacaccactcaacattcactcgcaagagcgtcattcatcacttgcacccagaaccaacaccagcaaaagaaataaaatctcatacaaaaatgcacctaaagggccgggcacggtggctcatgtctgtaatcccagcactttgggaggctgaggcagacggatcgcctgaggttgggagttcgaaaccagcctgaccaacatggagaaaccctgtctctactgaaaatacaaaattagccgggtgcagtggcacatgcctgtaatcccagctacttgcgaggctgaggcaggagaattgcttgaacccaggaggcagaggttgtggtgagccgagatagtgccattgcactccagcctgggcaacaagagtgaaactccgtctcaaaaaaaaaaaaaaaaaaagaaaaataagaaaagaaaatgcacctaaaagccgggtgtggtggcacatgcctgtagtcccagctactcaggaggctgaggcaggaggattgcttgagcccaggaggttgaggctgcagtgagccacgttcatgccactgcactccagcctggggaacagaatgagaccctgtctcaaaaaaaaattattatcctactattgatagatatttgagtttcaagttttggctaaaaagcctgctgtaaacattcttctacatgtgttttggtgcatataaccacctatttctattgacatatacctagctgtagaattgctagattatatgataaatgtatattcagctttagtggaaccttccagttttccaaagtggctgtactcctatcagtaatgtatgagcatcccttcccgtcactccacatcttcactcaaacttagtatttgttgtcagtccatttatttatttatttattttgagacagagtttcactcttgtcacccaggctggagtacagtggtgcgatctcagctcactgcaacctccatctccttggttcaagcaattctcatgcctcagcctccccagtagctgggattacaggtgcgcatcaccacggctggctaatttttgtatttttagtagagacgaggtttcaccatgttggccaggcgggtctcgaactcctgacctcaggtgatcctcccatctcggcctcccaaagtgctgggattacaagcgtgagccaccaggcctggcctggtcagtccttttaatattagccattctgatggagttatagttaatttgtatttctctactctgcaagggtgttaagtaccttattgtatattggtcactttttcttctttgctttttttttgagatggacccttgctttgtcatccaggctggagtgcagtggtgcaatctcagctcactgaaacttccatctcccaggttcacgcgattcttgtgcctcagcctcccaagtagctgggattacaggcgtgcgccaccacacccagctaaattttgtatttttcatagagacagagttttgccatgttggccacactggtctcgaattcctgacctcaagtgatctgcctgccttgacctcccaaagtgctgggattacaggcatgagccaccgtgcccagcctcactttttcatctttgttttgtgaagtgcctgtttaagtcttcacccactttcttattcactcacctggcttattgatttgtgagggttctttatatattccgaatatgagtcctttgagacaagacataatgcaaatgtcttctcccagtttgtggcttgacttttcactctcttcacgggatctctgatgaataaaagttcttaattttaataaagtctaattaatcagtattttactttatgattagtgctttttgggatctgattcggcttatccaagccaaataatatgtcttctccttgaaattcacaaaagcgcacccaaatgttaggtgtttttattagcaaaatttcaaaaatgttgatttattactttttactcaaaaaaagcgaagacatttttctgttattatttctttgtaataaaagactatataagagtctacaattcttattgtctgtttgtttgtttgtttttgagacagagttttgctctattacccaggctgcagtgcagtggcattatctcagctcactgcaacccccgcctcctgggttcaagcgattctcctgcctcagcctcctgagtagctgggattacaggtacatgccaccacatctggctaatttttttatatttttagtagagacagggtttcaccatgttggccaggctggtctcaaactcctgacctcaggtgatgcacccacctcagcctcacaaagtgctgggattacaggtgtgagccaccatgccccgcctgtttgttttttttgaaatgatctcactctgtcaccaaggctggaggggagtggtgccatcatagctcactgcagcctcaacctcccaggctcaagcaatcttcccaactcagccacctgagcagctgggactacaggcagacactactatgcctagctaatttttttttattttttgtacatacagggtctcactatgttgcctaggctgaacttctgggctcatgcaattctcccacctcagcctcccaaagtgttagaattacaggcctgagccaccgcacccagcctacaactcttatagcaatgttgccttcaaaggcagtttgggccacgtgccatttttgcctctgtccctgccttcttaacctacaccctgtagaaggtgcaactccactgtaagaacaactgcagctcctcaaatatcccatgtgctgcctacatttcccagtatcccttgcgctttgattagcatcatgtgattagttttggccaatgggctgtgagcataaatgatgcatgccatttccagactgaggcagtgaaaaactggcattcctcctctctccctcttccccctgcccaataaccttggaaaccatatgttctagatgggagaagagggctggccaacctatctcagactgtgtatgagtgagaaataagcctttgttttattaagccactagatttcaggacttaactattgcagcagctggcattccttagtctaactaatacccaaggagaatcagaacagccattaataggaactaccaaaactctgcaagttgaatgcatgtcctgacagttcctttgtcctcagctcagtactgaggttatctttggcaaagttctccatcactgattttcttaggtcagattctcccaaaagcagtccctgagacaaggatctgggtgcaaataatttattaagaagtgttcccttctcagcaaactatcgcaaggacagaaaaccaaacaccgcctgttctcactcataggtgggaattgaacaatgagaacacttggacacaggaaggggaacatcacacaccaagacctgtcatggggtagggggaggggggagggatagcattaggagatatacctaacgtaaatgatgagttaatgggtgcagcacaccaacatggcacatgtatacatatgtaacaaacctgcacgttgtgcacatgtaccttagaacttaaagtataataataaaaataaaaaataaaaaaaaaagaagtgttcctagctgggcgcggtggcttacacctgtaatcctagcactttgggaggctaaggcgggtggatcacctgaggtcaggagttcaagaccagcctggccaacacggcgaaacctcgtatctactaaaaatacaaaaattagccgggtgtggtggtgggtgcctgtaatcccagctacttgggaggctgaggcaggagaatcacttgaacccataaggcggaggttgcagtgagccaagatcacaccactgcactccagcctgagcgacagagtgagatgtggtctcaaaaaacaaaaaaaaagaaaaaagaagtattcccagggtaatcaataaggggatggtggggaaagcaggacagggaaaacaaagaagcaaaacaaacattcaataccaagtgaagtttcacacccagactgttccagccagggacccctggagcgcaaactataccccaaagctggtcccacctagagacaaaggagaagggctttggaccctgtattcatcagcttgggctgctacaacaaaatgccacagacttagtgacttaagagaaatttatcctctcacagttttggaggctgagaagttcaagttcaaggtgccagcaaagtcaatgtctgcagagggctctccccttgggctatagacaactaccttctcatgtgtccccacatggcctttctctcatgcatgaagagagagacagaaacagaagtaactctctggtgtctctctctctctatttttgtttgtttgtttgttgtttgtctgttttgagacagagtctcactctgtcgcccaggctggagtgcaatggcgcaatctcggctcactgcaacctctgcctcccaagttcaagtgattctcctgcctccgcctcccaagtagctgggattacaagcatgcatcaccgcgcctggctaatttttgtatttttagtggagatggggtttcaccatcttggccaggctggtctcaaactcccgacctcaaatgatccaccctcctcggcccctcaaagtgctgggattacagtcatgagccactgtacccggcctctctctctctttttaagagacagggtcttgccctattgcccaagctggagtgcagtggtagaatcatagctcactgcagcctttaattcctgggctcaaagaattctcccacctcagcgtctccagtagctatgattacagatgtacactaccacacctggctaattattttttcatgtatttttgtagagatggtctcactatgttgcctaggctggtctcaaactcctgggctcaagcaatccttccacctcagcctcccaaagcactgggattacatatgccagccaccgcaccttggtctgctgcctctttttataaggatgctaatcctattggatcagggccccaccctgaatacttcatttaacttaattgcctcctaaaagtcttatctctgaatacagtcacattgtggggcacagggatttggagggcacacaaacatttagtccataactgacccctaaacctattgatgattggctgccagggaaggttgagcaaggtaggctccaaggcactctggccctccatatgggcagggcagctccagggcccaagaacaacctctgaaggtcacaggtgtgagcaggtagcatgtaagcattaagaaaccaggggatggatgcactgaggtggggtgaggtccgggtgtggctgcccacactgcctgctactctgatgctgtatcagcaagaaacagcttatacatttctgttgtaatgggggaagcaaactttaatcatacatctgcagatttctctcactctacgccagcctgcagatgtcttctgctagagttaaaaatttccacggaattatctccaatctcctctcacagcctggtaatttggccaaaagaaatcccagatgtttcaaagaatccctaatagtgactgtagggctttgatttctcctcatccagttggtcccagggcactgccaagccctggttggtgtccttgtcaaattgctccgagagtgagcaaaaaaacggagaaacttgtgcccaaaacccaatcaagcatttgtcttaaaagcacactcgccttgaaagccagccaacttctgtgaaatagaaaagaatccattttctgcttctatttcttggcccttgaacaggcagtgactcaagactcaagtcagtggttggtgcagctgcaatgagacatccgtcagtgagctggcatctctgacaatggcgtgtgcccacagagaggctgtgactcaggagggcaggtggcactccatgatcccccaaagcagccaagccaggtggggtgccaagcatcccaggtgctcctgagctggaagaccgacagttttctaccagttgaagtcgtgtttggcaaagaaaccgttcagccctttaacagatattgacagcctgctagtttccaaaatggggtcaaaagatggagattctcctttgatggtgtcagcgggtgcataatggatgtgtggatgttctttgtgctcagaaacgtctgccgttccatccagttgcatgctgaagggaggtggggagctgccaactcctccacgacccatttcaaagtattaaaagaattgttagcaattccaggttgctggtgaaaacatctccttggttttctttcccccacttcaaatcacaaaccaacccaaccatttctagaatacacagctctactggggtcctattccatgtgctataggagactgcaaaacaaagtcttttttctttttttttttttttttttttgagacaggttctcactccgtcccctacgcaggagtgcaatggtgcaaacatagctcactgcagcctcaacctcctgggctcaagtaatcctcatacctcagtctcctgagtaagacaaaattttactggggcaatttcaactcttcgtaaggttttaccttttgaacttgtgctttccttttttttttaagatggagtttcactcttgtgtcgcccaggctggagtgcagtggcacaatctcgcctcactgaaacctccgcctccctgcttcaagtgattctcctgcctcagcctcctgagtagctgggattacaggcggctgccaccatgccaggctaattttcgtatttttagtagagatggggttccaccatgttggccaggctggtctccaactcctgacctcagacgatccatccgcctcaacctcccaaagtgctgggatacaggcatgagccaccatgcccagccttaagccaccgtgcccagcctgctgtctttattattattatttagagacaaggtcccactctgttgctcaggctacagtgcagtggcacaatcatagctcatcgtaacctcaaactgctgggctcaagtgatcctcccacctcagcctccagaggagctgggactacaagcacacactacctcactgggctcatttattttttattttttagagatagggtcttgcttgttgcccaggctggtcttggactcctgacctcaagcaatccccctgccttggcctctaaaagtgctgggattacaggcatgagccactgcacccggcttaagttatactttctacacacacacacacacacacacacacacacaaataatcatgttcgagttgcatagacttaagaagctcaatctacttacctactttgagaatgtcttaatttgaattcccccaggagccaagcctgcgacaaggatttgaggataagtagactatttaggaaatagcccctaggaagcatcggtagagaataagcaagaaagaggggaagagaaggcagctagcaaaggatacatccttagtgagttactgctgtgggcaataagggcttaatcccctgggaaatgggaggtggaaatccacctgacagttatcccactggaggggcaagggagctggaggatggatccgtgacctctgtcagtcattagcaggaagacggcacctgggggacttagattccccagcacttctggctgtcacagtgaagacaaaacagaccctggctgcaagagaaagcccccagggaaagaaaggcaggtgctcagagcaggtcttgggagccggaaatgaagctaatgtttgctaaagtgatgagggtgagggaataggtgtgaccttgagttgctggggatgaaaatcttgctacatgagcagtactaggcttttgtgacccaacaatagagaaatagaaaccaaaagactccatggatcaggtagagttaacttacagagaaaaaaagcctttttttttttttgagacagagtttcgctcttgttgcccaggctggagtgcagtggtgggatctcagctcactgcaacctccgcctcccgggttcaagcgattctcctgcctcagcctcctaagtagctgggattacaggtgcctgccaccacgcccggtaattttttgtatttttagtagagatggggtttcaccatgttggccaggctggtctcaaactcctgacctcaggtcatccacccgcctcggcctcccaaagtgctgggattacaggcttaagccaccgtgcctggcctaaaaaagcctgtttaaaaatgttttaggctgggcacggtggctcaggcctgtaatcccagcattttgggaggctgaggtgggtggatcacctgaggtcaggagtttaagaccagcctggccaacatggtgaaacccagtttctactaaaaatacaaaaattagccaggtgtggtggtgcgtgcctatagtcccagctactcaggaggctgagtcaggagaattgcttgaacctgggagggcggaggttgcagtgaaccgagatcgcaccattgcactccagcctgggcgacaagagtgaaactctgtctcaaaacaaaaataaaaataaaaataaaaataaaaaccctcccatagatgctccatacgctctaattctgtgtctccatccactgaaagcaaaattccaaggctttggctatggtggagcctcaagatggaaagaccttggatttctgaaatcatgggccgatgatcatgaaaatgcacctctgggatctgcaagaagtgtgattgaacaagcaccccagctgctgggctctgaagtccagcacgtcataggaactgaggccatgtttcccaagggctgctcctcacccgggcctgagcagagcagggacactgtggcaagccaggtcctgagagactcagaaatcttctgggacaagcaactttggctcaatggcctggccaaagtctctcagaaatgtcctgcagtctaagatgcttccaccccaccacaacttcacatgagcaaaatcttccttctattgtctcttttttgtcaatttctggtaaataacttctattgtcttaaaacacactggagttaagggatttaggcgttacagcagcagtggttgccttaattcattaatacaggaggaaattgaggggccattgcccaaaaggttaagttcaaaaccacaactccaggactgcaattcagggatcaggaagctgatgctggccggcgcctgtaatcccagcactttgggaggccaaggcaggcagatcacttgaggtcaaggagtttgagaccagtctggtcaacatggtgaagtcccgtctctactaaaaatacaaataactagctgggcgtggtggtgcatgcctgtaatcccatctactcaggaggctgaggcagaggttgcagtgaactgagattgtgccactgcactccagcctgggagacagagcgagactctgtctcaaaaaaaaaaaaaaaaaaaaaagaaaaaagaaaggcagacaggaaaaggaagccaataaaaggtgtgataatgagcactgtattagttagctattgctgcataacaaattacctcaaaacttcagtgacattaaataacacgtatctattatctaatagtttctgagggtcaggaatctgggaacatcttaggtgggtcctcagctcttgggcctgtcataggctgcaatgtaaatacaaaaaagaaatcatgaaagtgacaagccctccttccccttgggtagatgacattggctatatttctggctataccacaccttcccattagcattcagacttccctttttggggggaattgtccagctgaaagttgtcttaacacaaggactgttcccaacactagcctcccagggcaagcctgtgacacacacttggtcaacccaaagctcattgctttggctcctaggtgagtgtcccagtgtcatttgagaatgtttgtagaacagtggcagagatggcatgtagtcagagctgtttgccatgagaccttggctctgaactctctagctgggatccaaggaggaaggtttatctaatacagacatgccaaggatgaacctcctatgaactttttatccagcgtgaatgcgcatggaagtttggcataacacacaagtgaccaggagaagggatgtgctgaactctgctaaaggcttttctcccacaatatcaaggaaggaaactgaacagagctggctttcaggcctagagacctccaccctacctggctcctatcttggaggaatactgtccccaagtgacggggagaattccaaggaacctctaggtgctaacattgacacctaaattcatgggtctgcagacttctaccatggaatgcaattgtcttcacttaggttctcccagaagtagacaatgacccaaggactcaatgggcaagtagtttgtttaagggagacgccaggagataccagtaggggaataggggtgtgacacagagaagagagggcagtccataaaggtgcatgatgagcaagttacctctgtgggcaacaggggttcagtcatgctggaaaatgctggggactgagtggaacacacaccttagagtcatcccacttgaggggagagggagctggggtatttatccaccagctcccattggtcactgattaggggggcttattagggaatgaagaatgtggctgttaattctcagatacttccactctgctattcagtctttggcagctttaaagaaagccctcaggggccaagcacagtgactcacacctgtaatcccagcactttgagagactgaggcaggaggatcgcttgagcccagcagtttgagactagtctgggcaacatagcaagaccccatctctactaaaaatgaaaaaaaaattagccaggcatagcccaggcgtggtggctcatgcctataatcctagcactttgggaggccgaggtaggcagatcacctgaggtcaggagttcaagaccagcctgaccaccatggtgaaacgccatttctactaaacatacaaaaattagctgggcgtagtggcgtgcgcctataatcccagctacttgggaggctgaggcagaagaatcgcttgagcccaggaggcagagattgcagtgagctgagatcatgccattgcacttcagcctgggcaacagagcaagactccatctcaaaaaaaaaaaaaaatagccaggcgtggtagcacacacctgcagtctcagctactcaggaggctgaggcggatggatagcttaagcctaggagctcaaggttgcagtgagctatgactgtgccactgcacttcggcctgggtgacagagcaagaccctgtcccaaaaaaaagaagaaaagaaagcaagcaagctgttgggggccgagtagagtggctcatacctataatcccagcactttgagaggctgaggtgggaggatcgcttgagcccaggaggtcgaggctgcgatgagctatgatcacaccactgtacggagcctggatgacagagcaagaccctgtctcaaaaaaaaaaaaaaatcccttgggcaagaagatacaaatactggtagctggtagtatcttcccagggttagggcaattcaacattagtatcagctacaacaatttataaccttcatggtattcactagacccccagagctcccagaatttatgcccttcctccaagcctgtttttgcagcttcttgtctattctgtgaacatctgcacttgtttccataaaacccattccttaaattgaagatccacagaactcactcctgttgcaaacaaaaaccttgactgatataccctgccatctgaaatttgcagtgaaataatctgtaaataactgggcattaacaaggcttttccagaagacaattttcaaggtaaccataaagaatgtatttatttatttattattttatttattgagacagagtcttgatctgtcacccaggctggagtgcagtggtgcaatctcagctcactgtaacctccgcctcccgggttcaagcgattctcctacctcaacctcctgagtagctgggactacaggcgtgcgccactatacctagttaattgcagttggagatcgcgccattgcactccaggctgagcaacaagagcaaaactccatctcaaaaaataaaataaaacatatgatttttgagggcgaggagcagtggctcacacctgtaatcgcagcactttgggaggctgaggcacgcgtatagcttgagctcaggagttcaagatcagcctgggcaacatggcaaaaccttgtctctaccaaaaaaatacaaaaaattagccaggcattggtggcgcagcacctgtggtctcagctactcgggaggctgaggtgggaggatcgcctgagcccaggaggtggaggattcagtgagcaaagatcacaccactgcactctggcctgggtgacagagtgagactctgcctcaaaataaaaataaaaataaaaataaaaaatacgttttattattattcatgtatggtgaggccaacagatcaggatatgactgccattagaaaacacaaaagtttgttattcactcttcccgagaggacggggcactccatgccatacagggacacatgagaaagcaccagggttggtcaggaggcagaggtagtggggaaaacataggcaaaggtctttattgtgatttccaaagaaagaagcaggcaagggccgggcatggtggctcccgcctgtaatcccagcattttgtgaggccgaggcaggcggatcatgaggtcaggagttcgagatcagcctggctaacatggtgaaaccccatgtctactaaaaatacaaaaattagctgggcatggtggcgggcgcatgtagtcccagctactcaggaggctgaggcaggagaattgcttgagcccaggaggcagaggttgcagtgagccaagatcgagccactgcactccagcctgggcgacagagggacactccatctcaataaaataaaattaaaataaagtatacagacggaggccacgcaccatggctcatgcctgcaatcccagcactttgggaggccgaagtgggtggatcacctgaggtcaggagttcaagaccagcctagccaacatggtgaaaccctgtatctactaaaaatacaaaaaaaattagctggacatggtggtgggtgcctgtaatcccagctactcaggaggctgaggcaggagaatcacttgaacccgggaggcagaggttgcagtgagccgagatcgcaccattgcactccagcctgggcgacaagagcaaaactccatctcaaaaaaaaaaaaaaagtatatagacgaatatgcataatttatatgcaaatactatgctgttttatgtcagggacttgagcatccacagattttggtatctgcaggggtcctgaaactaatcctccttggacactaagggacaattgtattccttgagttatccaataactactgctcagcagttggtaataaaagttcagaggctgcatagaatcttcgtggcttctctgatttgactctgcaacactgtttcctttcatctccagcagagcatgccagctgcccggcaggcattcaaaatccagaattgaaggaaagcatatcgtgtgatcatctacttcttggatttgagtctttcccaggtgtggccatttctggatggtggaaggagatgttcctccctggaggtgaccctcagtcacatttatccctcatcctttcctgtatcctaaaaatagccaggatgctgggagctgttaaggctgcactgaggtatttttagccttaggatcctggagttggggcccagctgggctgagctgcaatgaaggggtgtcggggggcaggtggcacctcagagagcctttggagtggcccagtaatgtctcagttctgatttctgacttaatcaatggtgaaaattgagttatgggggaagaagcagaggaaggagtgaaatgcaaaaattcattcattcattcagtcagtcagtcagtcagtcagtcagtgtcaggctctgttctcagccctgagactacaagaacgaccaaaacaaaaatctgtgccctggaaatgaacaggcagagttcagaatatctacttgtatcagaaaacaaggaaaacgcctttaaagactaaaggagtgtttttgtcagatgaacatgggaacgaactgaaagaggctctccctagtcaaaatggggaccataacattctcttctgttagtcaaaagcctgtgtcataaaaaccttgcttacagatgttcaacgtaatttcttacagctccaatcagggcaattaaataagcagaccgtctaggggtttcacataacaagaataaatagctaaatgccagggatgtttgaaaagcaaaatatggttcattatttcccctgggagagtcgcactgagccacggattaatcaaaatacggagcatagcgcactgaaaagtattccattaccaggaagcgtaatttctgacttattctattttagaatagtaacaactgctaatttctgggtcctttctaggtgctaggcattatttcatgggccccaagaccgttgtctaacttgattctagccacaactcagcaaggagtatccagaccctttttgttttttgttttgttttgttttttgagatggaatttcactcttgtcgcccaggctggactgcattggctcatctcggctcattgcaacctctgcctcctgggttcaagcaattctcctgcctcagcctcccaagcagctgggattacaagattacaagcatgtgccaccacgcctggctaattttttgtattttcagcagagatggggtttcaccacgtgggccaggctggtctcgaactcctggcctcaagtgatctgcccgcctcagcctcccaaagtgctgggattacaggcatgagccgccgtgcccggccagaatatccagaccctttaagcacattttagcaaagaagaaagaggaggaggaaaagaatagaaggagcgggagggaaaagaatagaaggaggaggagagaaaaagagggaagaggaagtattttagtaatagtcatttttttccctttcagcatgtgaatacatgtatcagttagaattcaattctgctgcatagaagagaaaaataatagtggcttaaacagggcagaggtatatttttctgccatgtaggtgtaccacagtagttcagttcatggctggcaaggcagctccacaattatcaaggaccttaaggccttctaactttctgctctgtcatccttggcttccatcctcaaggttgcctcatgaccacaaaatggctgcgagagcaccagccatcatatccatgtcccagacaatattaagaggaaagcggctagggctaaagggtacacttctcaactgagccatcatcattaaagagtttattaaaagcctcattcagatattctaggtatccaggatcctggaattccctacttaattgaatccatgcccacattcaggacttgcatgggccttttccacaggtctattatcaaagtggaatgctggcccgacacagtggctcatgcttgtaatcccagcactttgggaggctgaggcagaaagagtgtttgaggccatgagttcaaacccagcctgggcagcacagcgagaccctgttgctacaaaaaataaaaataaaaaaaaaatactaggtgtggtaattaatgtagtcccagctactcaggaggactgcgtgagtccagaagttcaaggctgtaatgagctatgatcagaccactgcactccagcctggccaacagaatgaaaccctgtctcgaaatgaggttttttacctgggaggcagaggttgcagtgagccgagattgcaccactgcactccacccagacaacagagcaagactccgtctcaaaaaataaaataaaataaaaggaaaagaaaaaagaaatttcaggcagacgaggtcgcggcgccggaggccccagaagggtcgaaggcgccgcgggctggggtcggtggcttagggagcccgtccggccatggtggccgtggctggtggttggcgcggctgcgctgcggcccggggcagtgcggagccgggacagtcgcggcgctgacgcccgcgggccccagctgcagatatgaagcggagccgctgccgcgaccgaccgcagccgccaccgcccgaccgccgggaggatggatttcagcgggcagcggagctgtctcagtctttgccgccgcgccggcgagcgccgcccgggaggcagcggctggaggagcggacgggccccgcggggcctgagggcaaggagcagccgcctgccttggcctcccaaagtgccgagattgcagcctctgcccggctgccaccccgtctgggaagtgaggagtgtctctgcctggccgcccatcgtctgggatgtgaggagcccctctgcctggctgcccagtctggaaagtgaggagcgtctcctcccggccgccatcccatctaggaagtgaggagcgcctcttcccagccgcgatcacatctaggaagtgaggagcgtctctgcccggccgcccatcgtctgagatgtggggagcgcctctgccccgccgccccatctgggatgtgaggagcgcctctgcccggccgagaccccgtctgggaggtgaggagcgtctctgcccggccgccccgtctgagaagtgaggagaccctctgcctggcaaccaccccgtctgagaagtgaggagcccctccgcccggcagctgccccgtctgagaagtgaggagcctctccgcccggcagccaccccatctgggaagtgaggagcgtctccgcccggcagccaccccgtccgggagggaggtgggggggggtcagccccccgcccggccagccgccccatccgggagggaggtggggggtcagcccccccacccggccagccgtgccatccgggagggaggtgggggggtcagccccccgcctggccagccgtgccgtccgggagggaggtgggggggtcagccccccgcccggccagccgccccgtccgggaggtgaggggcgcctctgcccggccgcccctactgggaagtgaggagcccctcagcccggccagccaccccgtccgggagggagatgggggggtcagcccccccacccggccagccgccccgtccgggagggaggtaggggggtcagccccccacctggccagccgccccgtccgggagggaggtgggggggtcagccccccgcccggccagccgccctgtccgggagggaggtgggggggggtcagccctccgcccggccagccgccccgtctgggaggtgaggggtgcctctgcccggccgcccctactgggaagtgaggagcccctctgcctggccagccgccccgtccgggagggaggtgggggggtcggcccccctgcccggccagccgccccgtccgggaggtgaggggcgcctctgcccggccgcccctactgggaagtgaggagcccctctgcccggccaccgcccggtctgggaggtgtgcccaacagctcattgagaacgggccaggatgacaatggcggctttgcggaatagaaaggcgggaaaggtggggaaaagattgagaaatcggatggttgccgtgtctgtgtagaaagaaatagacatgggagacttttcattttgttctgcactaagaaaaattcctctgccttgggatcctgttgatctgtgaccttacccccaaccctgtgctctctgaaacatgtgctgtgtccactcagggttaaatggattaagggcggtgcaagatgtgctttgttaaacagatgcttgaaggcagcatgctcgttaagagtcatcaccaatccctaatctcaagtaatcagggacacaaacactgcggaaggccgcagggtcctctgcctaggaaaaccagagacctttgttcacttgtttatctgctgaccttccctccactattgtcccatgaccctgccaaatccccctctgtgagaaacacccaagaattatcaataaaaaaataaatttaaaaaaaaaaaaaaaaacaaaaacaaaaacaaacaaaaaaaaaagcctcattcaataacttctgcttacagctcattgggccactgctatctgcattaaattaggaaatgtagtcttttagctgagcacattgttacccccaataaatatgaaggtaggggttctgttaaaaagaagaatagagccaggcacggtggctcacacctgtaatcccaacactttgggaggctgaggcaggacaattgcttaagcccaggagttttagaccagcctgggcaacatagtaagaccccttctctacaaaaaataaaaaccagcagggcatagtggtgcatacctgtgatcccagctactcgggaggctcaggtgggaggatcactggagctggggagatgaaagctgcagtgagccaagatcacgccactgtgctccagcctgggtaacagagtgaggccctgtctcaaaaaggaaggaagaaaggaaggaaggaaggagggaagaaagggagggagggagggagggagggagggaaagaagaatgaagatgaatactgagactgcaattagcagtctctgccacaataaccatgctgcattttccatctggtttttactaattgcacaggaattctagccatgcccccttgcccttacctcttcacagtctgcaaaccagactgcttcccaagtgccaaaactggggtcttttgtttgctgttgagacctgctttgccacctgtaggccacagaatgaatgcccctgagagcagctctcaactagtaactgacaaaagttggtggataaatgccccagctctctcaccttccaatgagggacttcagcctacaccacacggaacagaagaactgcccagctgagctcagccaaccatagagtcatgagaaatcatcatcattgttctcagtctctgagttctaggacagtttgttactcagcaataggtaactgaaatgggtggaatgggatagaaataaatctttgttgctttaacgcccctaaaatttagcctatcctgactgactcaccctcattgtattcaccctctgctgaaagccaggggtttaaatctctgagcaggacatcaccctcaaacaaatgtggtttacttggtcttgtggaagacacaggatttgccagctatgtacggtcaagatcaatagcaagtctaaatggctttatgtaaagggaaacatgttctgtggctgggtttggtggctcaagcctgtaatatcaacactttgggaggccaaggcaggaggatcgcttgaacccagaagttccagaccagcctgagtaacatggtaaaaccccgtctgtacaaaaaaaaaaaaaaaaaaaaattattagccaggggtgttggtgcccatctgtaatcccaattcctcaggaggctgaggcgggaggattgcttaagcccaggaattcaagactgcagtgagccaggatcgtgccactacattccaacctaggtgacagagtgagacactgctcaaaggaaaaaaagaaaagaaaaagtgttctgcccttttattatgctggtgatatccaaacataattatcttgccatattcaaggtcctaaaaggcaagtctctctctactttccagtagaaataataagccatgtgttggtgctcacctatatgttcccctacatttcccagaatcccttgcagatgagacagacccatatgactcattctagccaatggattatcgccactgggatgaggcagttaagagctgatacattcctctgtccttctctttcctccctgaggtgattttggaagccttgtgagagatggtgctgttgcaaaatggaggaagactggatctctgcatcaccgcttggaggcgagcccctgctaactagcttacaggaataagaaacaaacttgtgctgtataaagctaccgaagtttctgatttgtttgttattggtactgaatatagccttatgctgtctagcaagcatcatttctggaaaaaggatgaattctcagggaatcttgcaaacattacatgtcattatccccagctacaatttgcataattcattttctgaggggaactcacagaacttagcaaagaactaccaaagataggtaggcagcactttgctgatcccatttgtttgagaagaaaaacaattttgagacagagtctcactcttttgcccaggctggagtgcgatggtgcaatcacagctcactgcagccccaatctcctgggctcaagcaatcctcctgcttcagcctcctgagtagctgggactacaggcacacaccaccacacccagctaatttttctgtatttttgtagagacagggtttcaccatgttgcccaggctggtcttgaactcctgggctcaagtgatccactcacctcagcatcccaaaatgctgagattacaggagtgagccaccttgccttgtggaaaatttatttattatgtgatgaatatcaagcttctttgtaaagaggatatagctaagagcctctcctagcagtgatgtacataagtcactccgcccatgtaagacgcagtttccccatttggaaggctggatggaaaggtctctgcaatctatcccctcatcaaaaaaaatttttggccaagcaaggtggctcatgactataatcccagcactttgggaggccaaggcgagaggatcgcttggggccaggagttaaagaccagcctgagtaacatagtgagacacccatctctacaaaaaagaatgttttcattagcccagtgtggcagcgcatgcctgtagtcccagctactcaggagtctgaggaaggaagatcccttgagtgcaggagttcaaggctgcagtgagctatgatcacaccactgcgctctagcatgggcaacagagtgagaccctctctttaaaaaaaaaaaaaaaaaaaaaaagagccaggcacagtggctcacgcctgtaatcccagcactttgggaggctgaggcaggcggatcacctgaggtcaggagtttgagaccagcctggccaacatggtgaaaccccatctctactaaaaatacaaaaattagcccggcatggtggcagacacctgtaatcccagctacttgggaggctgaggcaggagaatcacttgaacccaagaggctgaggttgcagtgagccgagatcacgccactgcactccagcctgggcgacagagcgagactctgtctcaaaaataaataaataaataattctttttaaaaaacacgctaattctagtttcagtctggatgataatttggggaagagaagcagagaggaaaatttggaattaattccctccatgtggcaacccctgaagatcacaaaaaagttacagtgagaatgggagcaaggattctaaaacttccccactcctggggaacctgctgtcctaaatttaaacttggaagagattttggcaacaccctcctgcctctttctgccaacaaactcactgaaattaacaaatggcctgtttgcttatgtttggtctgtccttagcgcagaaacggttctctgcgcccacaactgattatatccaaatttacttccagtttttcctctcctctcccctgttgggttgtgtcctcagtttgaaaggtcacattcatcaaattagaacatgaaaggttggcacacagacatttcgtgtgaatgcctaaatgcctggagcaggataagaagttaaaagaaaaaaaaaaacttttgcaaaagaaaaataattatcataacagctcaggcacagtcctagaggtttacatatattaaatttagcaacattggacttttttaacagcctgattttctctgccgtgcatgatttcctttgcccaaacaaaccattgcaacaaatttgtaatgcatagaaatgcagctatcggccgggcacagtggctcacccctgtattcccagcactttgggaggccgaggcgggcagatcacctgaggtcaggagttcaagaccagcctggccagcacagcaaaaccccatctctactaaaaaaacaaaaaattagccgggcatggtggcagacgcctgtaatcccagctactcgggaggctgaggcaggagaattgcttgaaccggggaggcggaggttgcagtgagcggagatctcgccattgcgctccagcctgggtgacaagagcaaaaatctatctcataataataataataataataaatttttaaaaaataaaataaaataaaaatgcagctatcatcctaaaatgtaaaatgtgagaagtggtgatcgaaaataacaaaaacaagccagatgcagtggctcatacctgtaatcctggcactttgggaggccgaggtgagaggatcacttgagctcaggagttcaagaccaccctgggcagaatagggaggcctcatctctacaaaaaatttaaaaattagccgggcatgatggtgcacacctgtggtcccagctacttgggagactgaggtgggaggatcatttgagccccggggggtcgaggctgcagtgagccatgattgtaccactgcactgctgcccaggcaacagagcaagacccccgcctttaaaagtaaataaataaaagacttgttttggaatatcaaacttttagaacttttggaggatgtgactttgaaatatctcagtttgactttggggtaggttttcatttctttcttcctttctgtgatatcctatttgggttcaaattccattcctcagcctctagaattctctccatccacagatcttacaatctgcatgccccagtcttctggattttgacatcaacttcatggaacgcaccagtctccccaccaccaccttatctgtggtttcactttttgtagcttcagctacctgcggttaactgtagtctgaaaatatgtgaataccgtacaataagatattttgagagagaccacattcacataactgtaattatttgctacaattgttctattgtattttcagtcattgctgtaattttcttttttttttttttttttttgagacggggtctcgctctgtctcccaggctggagtgcagtggcgcgatctcggctcactgcaagctccgcctcccggattcacgccattctcctgcctcagcctcccgtgtagctgggactacaggcgcccgccaccacacccggctcatttttttgtattttttaagtagagacggggtttcatggtgttagccaggatggtctcgatctcctgacttcgtgatccacccgcctcggcctcccaaagtgctggaattagaggcgtgagccagtgcacctggcctgttaattttcttacagtgcctaatttataagttaaactttatcctaggcatgtatgcataggaaagcacacagtatatatagggtctggtactatctgtggtttcaggcacccactaggactctcggaataaatatattgtccctcagataatggggagccgctatagtcctaataccagggctttgctgaggggctctgtaggtttgggttttttggggtttttttgtttttgttttttttgagacagagccttactctgtcacccaggctggagtgcagtggtgtgatctcggctcactgcaacctctgccttccaggttcaagcaattcacccacctcagtctcccaagtagctgggattacaggcacgtgcaaccgtgcccagctaattttttaatttttcgtagagtcagagtttcaccatgtcggccaggctggtctcaaactcctaacttcaagtgatccacccacctcagcctcccaaagtgctgggattgcaagcatgagccaccgcgactggtcgccttcaaactctttaaaagcatcaaggtcatagaagatgaggaaaggcaggggaatgatcccacgctgaaagaagctgaagggacctcacaactaaatacaacccatgactctgaattggacctttatgccctaaaggacaatattggggctattggcaaattatgaacaaggtctgggcattagatggttgtattagagcaaatttcttctcctcgttttgacaattgtttaatggttttgcaaaagaatgctcttgggtttaggaaacaaactctgaagtattgagggacaaactgaagtattgagggacaaactcggaagtattgagggacaaaactctgaagtattgagggataacaggcattgtgtcttctgccactaactttcttcttttttctttttttcttcctttttttttttttttttgagatggagtctcactctgtcactcaggctggagtgcagtggcctgatctcagcttaatgcaatctccacctcctgggttcaagccattctcctgcctcagcctcccgagtagctgggattacaggcgcaccccaccacacctggctaatttttgtatttttggtagagacagggttttgccatgttggccaggctggtctcaaactcctgacctcaggtgatccacccgcctcagcctcccaaagtgctgggattacaggagtgagccaccacacccggcctcaacgttcaatttcttgaaattgattattttgtaatcatgtcagagaatgttctcattcttttttgtttttgagacagagtttcgttctgtcgcccaggctagagtgcaatggtgcaatctcagctcactgcaacctccgcctcccaggttcaaacaattctcctacctcagcctcccaagtagctgagattacaggtacccaccaccacggttggctaatttttgtatttttagtagagatgtggtttcaccatgttggccaggctggtctcaaactcttgaccccaggtgatctacctgcctcagcctcccaaagtgctgggattacaggcgtgagccaccgtgcccagccagagaatgttctgattcttaagagatgcacactaaagtatttgagagtgaaggatcagtatatctgcaactaactctcaaaatatctaataatgtatgtgtatgtatatacatacatatctgtgtgtatatctgtagaaagagacaggcagaaacagatgaacctacgtaggaaacgttaccgactaaggagtgtaggtgaagggtttgtaggtgttcattgtactgtaatttttctacaggtttgaacatcttcaaaacaaaatattgaaaaaataagtcacggccgggcatggtggctcatgcctgtaatcccatcactttgggaggccgaggcgggtggatcacctgaggtcaggagtttgagaccagcccggccaacgtggcaaaaccccgtctctactaaaaatacaaaaattagctgggcctggtggcaggcgcctgtaatcccagctactcgggaggctgaggcaggagaattgcttgaacccgggaggcggaggttgtggtgatccgagatcgcaccactgcactccagactaggtgacagagcaagacgctgtctgaaaaaaaaaaaaaaaagggctgggcacggtggcttacacatgtaatcccagcactttgggaggccgaggtgggtggatcacctgaggtcaggagttcaagaccagcctgaccaacctagtgaaaccccgtctctacaaagtacaaaaaattagccaggcgtggtggcccatgcctgtaatcccagctacttggaggctgaggcaggagaattggttgaaccgtggaggcagaggttgcagtgagccaagatcgcaccagtgtactccagcctgggcgacagagcgagaccctgtctcaaaaaaaagaaaagaaaagaagccacctagtctatcgcctgtgttttgattatttcaagcacggactctgagtatcaaaacatcctcctcctgagagcctaatgaaggaaacagaggaagatttgagagtctcaggaacaacttggttgccacttagacgttaaccccagatgctccccatttccaacgatacctgcaagcgtgttttcaacaacatcgtggagtccagattaaagagctgttttcctcctcaaaaagtagagactccttcaagatttgcatgagccatttaggagccagggaaccttgggatagatgtgaatcttggaatgtgggttgttagaatattttaaagctggtgagaaaaaaattgaagtaaaacaaggatgtccaggcagaggcatctgcaagacaaattagcaccatcaccaccaccccgcccccctccccaacccagtcaacaaacaggacaagtaacacttctctgccctcgtgggaacagattgagtggaaggagttgatgggtggggaggtgacgttgccaaaatcccgaaatagagctgttcaaaacaccctttcacagcatgtcagacaaatgccggagtgattaaatgttgagtggagactttgagaagctgaaagaggagggcagaaactaggcatgaaaacatactcctttcatctccttccaaatctgggtcagcactcaactgcggcatcaggacactttctcagcatctgagaagcaacatcacctaatccaagtctgtcagggcgccaaaatactctggcttccggtgattagctgatttgtgcagtatgcattcatggagtgcttatgttccaagctctggaaaacacagtagcttctcccagttcctgccatcgggagcttgtagtccagcaagggaaatggggaagtagtgataatatgcttggttgaatttttttttttttttgagacagggtcttgctgtgttgcccaggctggagtgcagtggtgcaatcacggctcacagcagcctcaaactcctgggctcaagagatcctcccacctcagcctcccgagtagctggggttacaggcactgcttgaattattgttccagttttttcaatcctctgtagatccacactctgtgtgccgtgggactttgctgttattctcaccaaaagcagaacccttgcctcttgactttgggctgtttgggctgtgggaccagctttgctcaacaggtaaccagttccaagcatccctcaagaagcctcccatgtctccacttggcttatctctgtcatcatcatgagggaagcttcctcccaagaatgattattcctttggccgaggcctcagaatgaatacatgccagccaggcacagtggctcacgcctgtaatcccagcacttttggaggccaaggtgggcggatcgcctgaggtcaggagtgtcagaccagcctggccaacatggagaaaccccatctctacaaaaaaaaaaaaaaaaaaaaagtcgggcgtggtggcaggtgcctgtaatcccagctactcaggaggctgaggcgggagaaccacttgaatccaggaggcagaggttgcagtcagccgagatcacaccaccgcactccagcctgggcagcagagtgagactatgtctgaaaaaaaaaaaaagaatgaatacatgcagaattgatctaaacccaacctgcagagagaggccaaagcatgcatcaaagctgtccagctggtccccacccacatcagccaagtcctcagacatgtgggcaaaaataaatgattgctacttttggaatagccatcacaatagcccatatgctgggctgtcaagcaagtctcaacaaattttgtagaactgagatcctacaaagtatgagcacagtggaattaaactagaagtcaacaacaaaaaagataactagaaatttacaattgtttggaaatttaaccacacatccctaaataactcctaagtcagagaaaaaaaaaatcacagtggaaataagaaaatattttgaactgaatgctaatgaacatacctgaaaaaatgctgtgggatgcagctaaagcagtgctgagaggaaaaggcatagctttgaatgcctgtatgaaaaacgaaaaaaagcttaaggtattgttatttcaagatactgagttttggggtctcttttcttgtgcagcaatagctgactgctatgataagtagcatttatactgcattcattatgtggcagacccaagtaaacagaaccacacaggttatgtgaatggccagtaaggagtaaagtcagaattcaaatccagattggctctggcattaggctctcagcactgtgctatacttctcctagaggagaaacctaacaatcacgacattgtgataaatgctattaattcatagaagtgggtggacctaactcggaggattggaaaacacttccagaaagaagtgatgcttgacctgacagttaagagaaagtgaaggctgttgaaaaggttatgcagaggcccatgggcatgaacgacatagcccatagttcagtgtggctggcccatacagtgagcatgacttgtgtcaaaaaatgagaatgaagatgtagtccagatctgattcaagcctgtctaaagagggagatgatctgattagatttgcacctcaggaagatccatctgtagtatgtggaggattggaagagagatatgatgcaaaaattccagttaagaggccatgaaagggccgggcactgtggctcacacctataatactagcactttcgagggttgaggcaggcagaccacttgaggtcaggagtttgagacaagcctggccaacatggtgaaaccccaactctactaaaaatacagaaaaaactagccgggcgtggtggcgggtgcctgtaatcccagcactttgggaggccaaggcgggtggatcacgaggtcaggagattgagaccatcctggctaacacggtgaaaccccgtcgctactaaaaatacaaaaaaaaatagccgggcatgatggcgggcgcctgtagtcccagctactcggaagggtgaggcaggagaatggtgtgaacccgggaggcagagcttgcagtgagctgagatcacgccagtgcactccagcctgggcaacagagcgagactccgtctcaaaaaaaaaaaaatacaaaaattatctgggtgtggtggtgcacacttgtagtcccagctacttgggaggctgaggcaggagaattgcttgaacctgagaggcagaggttgcagtgaggtgagatcgtgccactgcactccagcctgggcaacaaagtgagaccttgtctcaaaaaaaaaaaaaaaaaaaaaaagaggccatgaaagcattgataaagactctctttttctttctttctttttttttgggaaacaaggtctcactctgtcacccaggctagagtgcagcagtgatcacagcgctcactgtaacctcgaccaccagagctgaagcgatcctcttggctcagcctcttgagtagctgggaccacaggcatgcactactatgcccgcctaatttttttatttttatttttatttttggtagagatgggggtctctctatttttcccaggctggtcttgaactcctagggctcaagcaagcttcacactagcctccccaagtgctaggactgcaggcatgagccacccatgactcctcttttcaactaggcatcattcttggatcctgtccttagcctgcttctgtcagtcttggcaaagaatcctgctaaattataccccaatccttaatattttatcaccctggccagccttcagcaagaatccttaagttagcatcttaatccatttgggctactctaacaaaataacatagattgagtggcttaaaagcaacagaaattcatttcccacaattctagtggctgggaagtccaagagcaaggcaccagcgcattcagtgcctgctgagaatctgcttcttggttcatagatgaccattttttcattgtgcccccacatggtggaagggttgagggacctctctgggatctgtttgatagaggcattaatcccattcctgagggctccagtcccataactttatcacctcccaaaggccctgcctccaacaccatcacattgaggattaggtttcaatacatgaatttgggcctggcacagtagctcacgcctgtaatctcagcattttgggaggccacggcaggtggatcacctgaggtcaagagtccaagaccagcctggccaacatggcaaaaacctgtctctactaaaactacaaaaattagctaggcgtggtgacatgggcctgtaattccagctacttgggaggctgaggcaggagaatcacttgaacccggaaagcggaagttgcagtaagctgagaatcatgccactgcactccagcctgggcaacagggcgagactccataaaattaaaaaaaaaaaaaccaaaaacatgaatttgaaggagacacaaacattgtctacaacaatggtttggcaagaatccccctatctgccgagtgcagtggctcatgcctgtaatcccaacactttaggagggaaaagcaggaagattgctggaggccaggagttcaagagcagcctgggcaacatagtaagaccctgtctctattaaaaataaaaaagaatccccctatgcttgatgtttcctcttagtcatttttcacccactaaacccttcactctgctcatcggctgtaaatgccaatctgtctttgctgttttggaaactgagctcatttctctgctgaagtctcttttcccctattacaatagtaccgaataaaactgtctttaccacttttaaccggtgtccagctctgtctcttcgacagcatccagatgagtcacaaagacctgaactaaagcattagcagttaggatccatcaagcatttctttaggatttattgttttaagtcctcagattttgtctaaggcaatgggaatgtagcaagcagtaaacacaacaggcaaaaatccctgccctgggccgggtgaggtggctaacgcctgtagaagtggcagaagttccatgcacccagactgcctcccacctcaagtatcagccacagcaactcatttttctgcctcggagcttttttgcagctattgaaggctgtctgcgtgcagatgctgccagaagttaggaagagataaagccccgaggaggtaacgctcaaccagtgcagagtcaataaatgaatgtgtcactccccaccctcatccgcttgggggactattctgactttttttctgcaccatttacttgcaggagtagctcaataatgcactcttcattggcttttcctcctaacctgtctgcctcttccaatatccctgttactgcttcctgaaaccattttccaaataaactatcagaaaagcaaaatgaagacgcaatcgaagagaacacttggggctgggcgcagtggctcacgcctgtaatcccagcactttgggaggccgaggcaggcagatcacaaggtcaggagttcaagaccagcctggccaacatggtgaaatcccatctctactaaaaatacaaaaattagccaggcatggtggtgcacgcttgtaatcctagctactcaggaggctgaggcaggagaattgcttgaacccaggaggcggaggttgcagtgagccaagatcacaccactgcactccagcctgggggacagggcgaaactccatctcagaaaaaggaaaaaaaaaaaaagagaacacttggaaagaccaggagtggacatgatgtcaaataaaagcagacagcccaagaataacagagtgaaacagaggcggaggaaaaaaagaattgagacttaggggaaagccatttcccatcgttaactactttcagggcaaaaggagaagtaattggagaagtgattggtttagtgatttttctaaaaatagtttctgtgttaattaaaatttacagagaaagcaaatcaatgtgttcccctttatctctgcctaatttctgtcctcccaactcatgagtggggctattgaagacattaaagagaacaaagttgctaaggacatgaaaacccatgggaaaacatccttacatgagtgaatgcctagagagccagccagtcccacctgtatccattctaaggcaaagactaaacatacaatttatcctctaaaaaaatccaggtgggatcaggtgtggtggctcacgcctgtaatcccaacactttgggagaccaaggtggggaggattacttgaggccaggagttcaaggccagcctgggcagcatagcaagacctcatctctacaaaaaataaaaataattagccggacatggtggtacacacctgaagtcccggctgttcgggaggctgaggcagaagaattgcttgaacccgggaggtggaggttgcagtgagccgagattgtgccactgcacttccagcctgggcaacagagcaaaactctgtctcaaaaataaataaataaaaggctcctcttgaggcaacgcctaaaacctagatgtaatgacggagctcttgtgccctcccgtgggcatcatgcctcagatcgggagagcagctctaagcgctctctggggagaagcttgtcagacacaagcatgcatctgtcaatggaattccaggcaccgaggccaacattagcatgcaagcgaaatgctgaaggatgttatgctaaatgcaaaagccaggcacagaaagaccaattccacatgctctcactcctctatgagatctaaaaaagttgaactcaaagatgcagagagaagaatgatgattaccaggggctgaatggggagtggtgggaagtggagagatttttgtctaagagtgtaagttgcagttagacaggaggaatactttttttctttctgcaagttatggtgtacatgagaaatgttttacatgtatataatgcatagtgattaaatcagggtatttagggtatccatcacctaagtctctcactgtcatgcaggctggagtgcagtggtgcgatctgggctcactgcaacctccgcctcccaggttcaagcaattctaatgcctcagcctcccaagtagctgggactacaagcacgtgccaccacacctggctaatttttgtatttttactcgtgacaggtatttttagtagcgacagggtttcaccatgttggccgggctggtttccaactcctgacctcaagtgatccgcccctccggcctcccaaagtgctggggttacaggcgtgagccaccgtgtctggctgagaaggaatactttttttatttgtgcaaattatggtgtactgagacattttttatgtgtatataatgcatagtgattaaatcagggtatttagggtatccagggtatctgtcacctaagtacaatacatttttttaagtatagtcattctactctgctatcaaacatggaatatggccgggcaccgtggatcgtgcctgtaaccatagcaggcaaggattactttgcctttcacctttgggaagccaaagcataaaaattacttgagtccaggagttcgagaccagcctagacaacacagccgacaaccttttttatttttttgagacggagtctcactctgtcgcccaggctggagtgcggtggcactatctcagctcactgcagcctccgcctcccaagttcaagcaattccccagcctcagcctcctgagtagttgagattacaggcatgtaccaccacacccagctaatttttgtatttttggtacagatagggtttcaccatgttggccaggctggtctcgaactcctgacctcaggtgatccacccgcctcggcctcccaaagtgctaggattacagacgtgagccaccacgcccagccttcttttttccctcttctatcaaatgaaactaccttaagtgcaagggcaagtgattccatcctggtagccttaccatctggtctaatgcctgacacaaaataaatgaccatccatgaacaaatcgatgagcgattcaattaattgtttacccagctcaggcctaaatgggaagaggaggaaagcaaagtagaataatatgagggcacagcaaaggatgcccctacaaaaccatgcgtagaacacctccccagaaacccccatactataggggttctggctatggccttcaacacaagtttaccaacaacaggtttcctttggggataatgaaaatattctgaaactaaatagaggtggttagccgcctgtgatctcagctacttgggaggccaaggcgggaggatcactggagcccaagaatttgagatcagcctaggcaccatagtgagaacttgtctcattttgtgtgtgtgtgtgtggttttttgtttttaaatgttgtggcggttgcataacattgcaaatgtactgccactgaactgttctttttaaactttttctttttttttgagatggagttttgctcttcttgcccagtcctgcctcagcctcccaagtagctgggattacaggcacccgccactacgcccagctaattttttgtatttttagtagagacagggtttcaccatattggccaggctggtctcgaactcctgacctcaggtgatccgcccacctcagcctcccacagtgctgagattacaggcgtgagccaccgcgcccaacctaaaacttaattttatgttttgtgaatttcagttcaactttgtttgtttattgagacagagtctctctctgtcacccaggctggagtgcagtagcatgatctcggctcacaacagcctcaaactcctgggcccaagccatcctcccacctcagcctcccgagcagccaggattacaggcacgcacctccactcccagctaatattttgtatttttttgtagagacgaggtctcactgtgttttccaggctggtatcgaactcctagtctcaggtgatcctaccgccttggcctcccaaagtgttgaaattacagaaaacagccaccctgcctggctcaatttaaaaaagaaaaaaactgatatacaaatttgaaaagttttgctaaaaaggaaaaacaaaggctccctctggctgcagtgtggagaatagactgccccatgaggcgaagtggattgtgatggtcatgaggaagctggagggtgtacctcagttctcgaacttcagttattatactttccttagttctatgacttatgaaatatttctcagccgggcgtggtggctcaagcctgtaatcccagcactttgggaggccgaggcaggtggatcatgaggtcaggagttcgagactatcctggccaacatggtgaaaccccatctctactaaaaatacaaaaattagctgggcatggtggcacacacctatagtcccagctactcgggaggctgaggcaggggaatcgcttgaacctgggagggggaggttgcagtgagccgagatcacgccactgcaccccagcctggcaacagagctagactctgtctcaaaaaaaaaaaaaaaagaaatatttctctcctttttttgagaaaagatctcactctgccacccaggctggagtgcagtggtgcaatcatagttcactgcagcctctacctcccaggctcaagtgatcctcctgcctcagcctcccaagttgctgggaccacagttgtgtgccctcacgcctggctaatttttttttttttttcagagacagggtttcgctatgttgcccaggctggtctcatacgcctgggctcgagcgatcctccccccttggcctcccaaagtgttgagattacaggcatgagccaccctgccctgtcctatttatgaaatatttcttgagggacatagaatatttggtctcagtgccagcaggcctgctgaatttcccgagtcttgggaaatgccaagaaataaaggtactatcaccaggcaagctggagtggtgagcgacttgatagtctcagaatgatatcgccagctgttggaaatcttgtagaactggctaacacccactgaacagttgctacgtaccaagcactgcattaatgcacttaatcctgacaatagccctgtgggctgatgggccagggttttgtttttgttcttgttgttgttttgagatggagtctcgctctctcacccaggctggagtgcaacggtgtgatctcagctcactgcagcctccacctcccaggttcaagcaattctccttcttcagtctctggagtagctgggattacaggcatgcactaccacccccggctaatttttgtatttttagtagaaatggggtttcaccatgttgaccaggctggtctcgaactcctgacctcaggtgatccgcccgccttggcctcccaaagtgctgggatgacaggcgtgagccaccgtgcccggcctaatgggctgttttatcaccgcctcactgtagcagtccctctggtgccgcaagtcccctctctgcatctgcaggagacagttccctgtgagacctgacttacttgtcccacctcaagcctggaccacacatcttttggctttcttcagccttctccaacccctcaaggcagcccaaaagtttggggctaaagaccccagggtgagctggacatggtagcccatgactgtaatcccagcattttaggaggctgaggtgggaggatcacttgagcccaggggttcaagaccagcctgggtaacatagggagaccttgtctctactaaaaataaaaatttttaaaaagtcaggcgtggtagcatgcacctgtagtcccagctactcaggggccgaggtggaagatcaaggctggagtgagctatgatcacaccactgcatttcaccctgtacaacagagtgagaccctgtctctaaaaaagaaaaaagacttcaggctgtaattgatcacagtgaacatcagcacatcgtatcacatgtcccctaataggctatactcaaaaggacgcatcatttctgtggaattcctgccagaaatgcataacctcataggcagagtagtcaaattcacagtgacaaaaaggtgctttccagggactgcgaggaagcagggaataggaaattattgctcaatgggtacagagtttcagcttggaaagatgcaaacatcctggagaaggatagcggtgctggttacacaacaatgtgatgtacttagtatcactgaactgttcacttacaaattgttaagatgggctggaggcgatggttcatgcctgtaatcccagtgctctaggaggccaagactttttgaggacaggagtttgagaccgccatgggcaaccccatctcccaatagcgagaccccatctccaaaaaaaattaagatggtacattttatattgtgtatattttgccacagttagaaagagaaagaattgtttggccaggtgtggtggctcatacctgtaatcccagcactttgggaggccaaggcaggcagatcacctgaggtcaagagatcgagaccatcctggctaacacggtgaaaccccgtctctactaaagatacaaaaaattagtcgggtgtggtgccgtgtgcctgttgtcccagctactcgggaggctgaggcaggagaatcgcttgaacccaggaggcagaggttgcagtgagccgagatcatgccactgcactccagcctgggcaacagagcgagactctgcctcaagaaaaaaaaaaaaatagccaggcatggtggcatatgcctgtaatcccagctactacggaggctgaggcatgagaattccttgaacccagaaggcggaggttgcagtgagccaagacctaagacaatcccatgtaacaaatgaggagatgaggccctgtattagtccattctcacattgctataaagaaatacttaagactaggtaatttataaagaaaaaaggtttcactggctcttttacctgcggtacagccatggttccatagcccgtacagggagcatgatgctggcatctgctcggcttctaggaaggcctcaggaaacttagaatcatggcagaaggggaaggggaagcaggtacgtcttacatggacagagaagaagagagaatgaggcaggaggtgctacacacttccaaacagccagatctcatgataacccacacactatgtagcactggaaggatggtactaaaccatgagactgccacccccatgatctgatcacctcccaccaggacccacctccaacactggggactacactctgacataagatttggaggggacacagatccaaactatatcaggaccagagaagttaaggagctctcccaaggtcccacagccaagaaatagcagaggtaaggctccaaccagacaacccagtgtcacactctaccctctcgatcactacactctgccacctctaagagttaagcaatttcccatttaaaatttcactaatttagacccagatttatgtccccataattccctattgtaaacccaaacaacattcttccaccaacttatttgaataacgtgtgtaggacagaaagaagtgacagcttgaaactactctaattttacttacgaataattgaggttgattcatgctgctttctaaaaaactggtaatcctcttggtgttccaggatgccaaatttgtcacgtacgtctcttacaacttctactattctctctcgaaagcagtactcaaaagcagacagtcacaaagatagggtactcaacaaggggtgttccaagacaggagaaagttaactttcccaaaacagatggaaagagccgaaaaggaagaaggaaaatgaaggaggagcttccgggagaaagacacattagtgttcaatgtcacaaagtctattagtagagtataaaaaaaaataatgggccaggcgcagtggctcactactgcaatcccagcaatttgggaggccgaggcgggtggatcacctgaggtcaggagttcgagaccagcctgaccgacatggaggaaccctgtctctactaaaaatacaaaaattagctgggcgtggtggtgggctcctgtaatcccagctactcgggaggctgaggcaggagaatcgcttgaacctgggaggcggaggttgcagtgagccaagatcgcgccattgcactccagcctgggcaacaagagcaaaactccgtctcaaaaaaaataatgataataataaagctggctgggcacggtgtctcacacctgtaatctcagcactttgggagacctaggcaggaggattgcgtgaaaccagttcaagacaagcctgggcaatatggcaagacgcctgtctctacgaaaaaaaatttttcttttaactacccaggcatgctggtgcgtgcctgtggtcccagctatttgggaagctgaggcaggaggatcgcttgagcccaggaggttgaggccgcagtgatccatgatcgtgccactgcactccagtccgggtaactgaggagtaagaccctgtctcaaaaaaaaaagaaaaaactaacctaaactaaactaaagagaccctaaaagggagcagtttagagaacatccaagcttgaatctttctcaggtaactaccttgaggtaagtgatactaaagggcatgaaagcgtctcttttatttctttttctttgagacagagtcttactctgttgcccacgctggagtgcagtggcacaatctcgcctcattgcaacctctgcctcccgggttcaagtgattctactgcctcagcctcccgagtagctgggattacaggtgcccgccaccatgcccagctaatttttgtatttttagtaaagatggggtttcaacatgttggccaggctggtctcgaactcctgacctcaggtgatccacccgccttggcctcccacactgctgagattacaggcatgagccaccgtgcccggccaagagcgtctttgtgttgggtcacttgggatgtagcttcttgctatttcttgttctaccaaggttttcattgccgagggctgccataacagtgtcaccaactgggtggcttaacacaacagaaatgtattcttttacagttctggtagctagaagtcagaaatcaaggtgtcagcagggccacactccctctgcaggctctttcttgcctcttctagcttctggtagcccctggcgttccttggcttatggttgcatcactctaatctctgcttccatcttcacatggccatcttccctttatctctctctgtcatctcctcttactgtaaagtggccactagtcaggctaggcatggtggatggcacctgtaaccccagagctttgggaggccaaggcgggaggatcgcttgaggccaggagttcacgaccagcctgagcaacataaaaaataccccgtctctaccaaaaataaaaaattagccaggtatagtggtgtgcatctgtagtcccagctttttgggaggctgaggcaggaggattactagagcccaggaattagcgacttcagtaagccatgatcatgccactgcactccaacctgggcaacacagggaaaccctgtcgctttaaaaataataataatagggccgggcgcggtggctcacgcctgtaatcccagcactttgggaggccgaggcgggcggatcacgaggtcaggagatcgagaccatcccggctaaaacggtgaaaccccgtctctactaaaaatacaaaaaaattagccgggcgtagtggcgggcgcctgtagtcccagctacttgggaggctgaggcaggagaatggcgtgaacccgggaggcggagcttgcagtgagccgagatcccgccactgcactccagcctgggtgacagagcgagactccgtctcaaaaaaaaaaaaaaaaaaaaaaaaaaaaaataataataataataataatagtaaggccaggtgcggtggctcacgcctgtaatcccagcactttgggaggatgaggcaagcagatcacgaggtcaggagttcgagaccagtctggccaacatagtgaaaccccgtctctattaaaaattacaaaaaaattagccgggcgtggtggtgggcacctgtaaccccagctactcaggaggctgaggcaggaaaattgtgtgaacccgggaggcagaggttgcagtgagccgagatcgcgccattgcactccagcctgggtgacagtgcgagactctgtctccaaacaaacaaataataacaataataataataataataataataataataataataataaataaaagacactagtccaatatttccaaaaacaaacaaacaaaaacactaagctgtggctggacgaggcagctcatgcctgtaatcccagcactttgggaggccaaggcaagaggatcacttgaggagttcaagaccagcctggccaacatggcgaaaccctgtctctactgaaaatacaaaaattagccagacgtggtggcaagtgcctgtaatcccagctactcggaaggctgaggcaggggaaccgcttgaacccaggaagcggaggttgcagtgagccgagatcgcaccattgcactccagcctgggtgacaggacgagactccatctcaaaaaaaaaaactaagctgttatataacagagacccaagaatgtagcagtttcaagaatatccaagaatgaagtcattttggactggggcccaccttaatgacatcatttaacttggtaatatctgcaaatagatttccaaatcaggtctcattcacagacactgagggataagactttgacatatctttgaggggacacaaggtaactcctaacagccatcacctcgagcactgtccccgttgcagggttgatgctgggatggaggaatgtccctgtttctactccatggaggagaaagagcacagagtagcccacacttggtgttagaaggcccgtacccagaaatgccatgcctcatcactgttcatttttcactggacggacggtgccctccatggctacacctggctacaatgaaggctgggacaagtaacccttaactgggccaccatgcaaggtgaaacagcaccactgctatgcaagcaaaagaaagcaaactttggtctgggcacggtggctcacgcctataatcccagcactttgggaggtcgaggagggcggttcacgaggtcagtagttcgaacccagcctgatcaacatggagaaaccccatatctactaaaaatacaaagggcgtggtggcatgcatctgtaatcccagctactcgggaggctaaggcaggagaatcacttgaacccaggaggcagaggttgcagtgagctgagatcgctccattgccattgcactccagcctgggcaacaagagtgaaactccgtctgaaaaaaaagaaaaaagaaagaaagcaaattgtacgatgccagcttcccctaatctgagcgtcttacataaccatgccacatttgtcaaaactatgatattaacattggtacaatactattaagtagacttcattcaatatcactgtcttttttggccaggcccggtggctcacgcctgtaatcccaacactttgggaggccgaggcaggcagatcacttgaggtcagttcaagaccagcctggccaacacggtgaaaccccatctctattaaaaatacaaaaattagctgggcatggtggcacaagcctttaatcccagctactctggaggctgaggcaggggaatcgcttgaacccaggaggtggaggttgcagtgagccaagatcatgccattgcactccagtctgggtgacagagcacgactctatcttgggaaaaaaataataataaattttttttaaataaaattaagggcagggagtggtggctcacgcctgtaatcccaacactttgggaggccaaggcaggtggaccatgaggtcaggagttcgagaccagcctggccaatatggtgaaacctcgtctctgctaaaaatacaaaaattagccgggcatggtggcatgcacctgtagtcccagctactcaggaggctgaggcagaagaatcgcttgaacccggaaggcggaggttgcagtcagctgagatcgtgccactgcactccagcctgggcgacagagcgagactccatctcaaaaagaaaaataaataaataataataacaataataataaaataaattaaattaagtctcttgctcacaagaggataaatgataggcatggtttcaacatgcttttctaatagcaatgagatgggacatttcaactctttagacacttttccccttggctgtatatttttgtgccacttcctggaattaagagcatattgtgggccaggcttagtggcgcacgcctgtaatcccagctactcgggaggctgaggtacaagaatcacttgaacctgggaagaggaggttgcagcgagccgagatcacaccactgcactccacagcctgggagacaaagtgagatcagtctcaaaacaaacaaacaaacaaacaaacaaacaaacaaaaaaacgttaaaatgaaggctatagtttagattcatcccccccacccaaggccaaccacccataaccacacaaagtttgtcatcttgattcccctgaaatgctagctctaatcataaatgaaacatgaaaatgtaagttttacatccttgtcagcatgattcagtgaaattaaaccaatcggctgtagacaaatgagcttaaacgggtctatttgccttaaaaagaagttaatgtaaaacagccaatcacaaaaaagctcaaaatacttcctcctttatgccttataaacttgccctaactgctgtaagagaacttcttaccacttgatttgacatctcctgaatcaagacttgctgtatgacaaagaacttttaatttttttctaactgtatctgattttatatatgtatgtatgtatgtgtgtgtgtgtgtgtgtgtgtgtgtgtgtgtatatatttgttttgttttgttttgttttagacagtcttggcctatcattgagctggagtgcagtggcatgatctcggctcactgcaacctctgcctcctgggttcaagtgattctcaagcctcagcctcccgagtatctgggattacaggtgcccactaccatgctgggctaatttttgtatttttggtagagatgggcgttcactatgtttgccaggctggtctcaaactcctgacctcaggtgatccacccgcctcggcctcccagagagctgggattacaggcgtgagccaccgcgccaggcctgattatatttttgacactaaaagtatcgtatgcaggaagacagctggcacacacggaaacttcatgcaaatagaatgaagtatgctctctaaaagacaaattagaagaaggtgccctatcctccaacttggagaacacagcctaggccggacttcagccccattctcatgccctcggccaggcacacttgttcagggcacaacctgcacaatcgtacacagtggccctgactatgtctgtatgcaactacaaaaacaataggccggacgcggtggttcacgcctgtaatcccagcactttgggaagccgaggtgggcagatcacaagatcaggagtcccagaacagcctggccaatatggtgaaaccccgtctctactaaaagtacaaaaattagccgggcatggtggcgggcccttgaagtcccagctactcgggaggctgaagcaggagaattgcttgaacccgggaggcagaggttgcagtgagccgagatcgcaccactgcactccagcctaggcgacagagcaagattcagtctcaaaaaaaaaagtgaagagaaaagaggatccggtatccaaatgtgttttatataaaatgaatcgttttcagtgcactgaggaagttttctatttaaagaaatcctgctgtgaactcttttgtgaagaatgctttcctaatggaattagtcaccactgagtcatttctgcaaacttcaggtttgcggttttgcctaagcaagatctggccggagaagtgagataaattatagatgtcgctaataaattacagattactcaaaggcaaaagaggaaagaaaaaaaaaaattgactcgtgtatatgaaccgaattgagtcaggggtctccaccggcgcttaatcatggccgagatcctcctgcttctgcctgtcctttggtagacacacgctacaagtcagcttctgtccatcgaggaagggaacgaactaacaacaaagaacaattaagagaaggttggccccgtgaaaacaagggaccattgaagagcgagtaaaggcttggccacgttctggccccgccccaccccggtcgccctgacaacagcgccggcgtctgggctgagcttcggactcgcagccagcctcccacaggccaccgcgcgcgctcacttgcgcatgcgcctcggagctggcttcaaccagcgaaggctgaacccgcttccagggtcctcgccgagctgggagttaggatccgagggggccaagagggataagaaaacttctctgggtgcccacgtggtactgagcgcccttgggagggctctggagaagaccatcgccttccagggtagctccctccctcaaaggtttgagatcatggtccagttctcgggtctcccagcctcagtttccccatttgtaggaaaggcgttcacagcctctatctcagaggaggctttgaggattcagagagctcagaagagggtaggctttgtggtgagcgctgggtaggacttcggggtgggagtggtgggctgaagagtccccgacaacagcccgaggaagtattattattgttcttattttacagggaaggaaactgaggtccagaaaagttatgactcgccccaaggggattgcctggcaggacgtgaaggggaagaggcccaccctggagtaaccctcactggagaatccagaggtgagatgagccttgtacctatctcagcagagggagtaggataatatttaaatattaagggtggggagaaggaatgaaggcaagaaataaaatgcccaaaatgccccaaacgccatccggaccataaaagtgatggcgatagtgttggacttaggagctcaaagatgctaaccttgacaggcctggtggcccaagtctgtagtctcagctacttggaaggctgaggcaggaggatcgctttagcccaggagtgccaatccctcctgggcaacatagtgagatccttgtttccttaaaaaaaaaaaaaaagtgcatactttctttctttttttttttttttttgcgacagagtctcactctgttgcccaggctggagtacagtggcacgatctcggctcactgcaacctctgccttcccggtccaagcagctctcctgccttagcctcccagtagctgggactacaggcatgcaccaccacactcagctaatttctgtatttttagtagagaccgggtttcaccgtgttggccagactggtctcaaactcctgacctcaagtgatccacctgcctcttcctcccaaagtgctgggattacaggcatgagcaactgcacccggcataaaaaatgcataccttttgaaattttttttttttttttgagacggggtcttgctctgtcacccaggctggagtgcagtggcgcgatctcggctcactgcaagctctgcctcccaggttcacgccattctcctgcctcagcctcccgagtagctgggactacaggtgcccgccacctcacccggctaattttttgtatatttagtagagacggggtttcatggtgttagccaggatagtctcgatctcctgacctcgtgatccacctgtctcggcctcccaaagtgctgggattacaggcatgagccaccacgcccggccttgctggaaaattcttaagcccacctggcatctccatcttagtcaaacggcccaccaacttcctgttcaaactgagctattttgatttctgagtttgttaaccttggcactactggcattcggggccggatcattctttgtagtgcaaaggctgtcctgtgcactgtgagaagttgagcagcatatccagcctctgctcattagacgccatagccaggcacggtggctgacgcctgtaatcccagcactttgggaggccgaggtgggtagatcacctgaggtcaggagttcaagaccagtctgaccaacatggagaaaccctgtctctactaaaaatacaaaattagctgggcgtggtggcacatgcctctaatcccagctactcgggaggctgaagcaggagaatcgcatgaacccagaaggtggaggttgtagtgagccgagatcatgccattgcactccaacctgggcaacgagagtgaaactccatctcaaaaaaacaaaaaacgaacattagacgccatgaacactccctcccaacccaatttgtcacaaccaaaaatgtctgcagacattgcccctgaaggggtgaagatggctcctattgagaaacactggccatgagccaagaattaaaagagagaaatctgttagttttcactaaatagatttgaattctttattttattttattgtttttgtttcattttattttgagaggcaggatctcactctgtcccccaggctggagtacagtggtgcaatcatgactcactgtagcctccaactcctgagctcaagggatcctcccacttcagcctccctagtagctgggactataggcatgcaccaccctgcttggctaatttttgtatcttttgtagagacagggtctcactatgttgcccaggctagtctcaaactcttggcctcaagagaccctctcacctcagtttcccaaattgttgagattacaggcgtgagccagcacgcctggtcttgaattctttaaccattgtcctctaccagaaagtatacactatattaattctctcactgtagagattgtttttttttttttgagatggagtctcgttctgtcacccagactggagtgcaatggcacgatcttcactcactgcaacctctgccaccgggttcaagtgattctcctgcctcaccctcccaagtagctgggattacagggacacaccaccacgtctggctatttttgtatttttagtagagacagagtttcaccatgttggccaggctggtcttgaactcctggcctcaagtgatccgcccgcctcggcctcccgaagtgctgggattacaggcgtgagccaccgcgcccggccctttttttgtttgttttaagacaggttctcactctaccacccagcctggagtgcagtgctgcaaacatagctcactgcagcctcaacctcctgggctcaaagggtcctctcacctcagcctcccaggtagctgggattacaggtgtgctccaccatgcacagctaattggtttttggttttagttttggttctgttttgtagaagtgaggcctcactttgttgcccaggctggtctcaaactccctggggctcaagtgatcctcccacctcagcctcccaaagtgctgggatgggcacaagcttctgcacctggctaagattcttaaaatagccagattttctggaaactggttgacccagttggattatatgaaacacaatggatgattgtaatcaacagttcaactgagtggaactagccctggccaaggatcaggagatcttagcagggcacagcggctcatgcctgtaatccagcactttgggaagcctaggcgggtggatcacctgaggtcaggagttcaagaccagcctggccaacatggtgaaaccccatctctactaaaaatacaaaaaattagtcgggcatggtggtgggcacctgtagtctcagctgctcccagctgaggcaggagaatcgcttgaacctgggaggcagaggttgcagtgagccgagattgcgccaccgcactccagcctggaagacagagcgagactctgtctcaagaaatcaggagacttgagtctgttgccagttctaccattacaagctctgtgacattatcacttaacttttccctggacttgttttcccctctgtcaaatgaggatgttgaggtgatttctaaggacttacaaacacccagattctgacaggatgctccctccccgtcccccaccagaagttattgaagccgcccagccaccccagtgtctgtgttttttttttttttctccagcccccagcccagtcccctaaacacatcttttggagtcagctcttccaagctgttgttaccactcagacaaactcattattattcctgatgctaatgggtaaattacggtggtggttaacacagcagtggcaggggctcctttgtgggaaattatggtgtttaagcacaagacaccctggggtttgcctgaggaaaaataaaatttaaaactggcctcttgcggccgggtgcggtggctcacgcctgtaatcccagcactttgggaagccaaggcgggcggatcacgaggtcaggagatcgaggccatcctggctaacacggtgaaaccccatctctactaaaaatacagaaaattagccgggcgtggtggggggcacctgtagtcccagctactcgggaggctgaggcaggagaatggcatgaacctgggaggcagagcttgcagtgagccgagatcgcgccactacactccagcctgggtgacagagggagactccgtctcaaaaaaaaaaaaaatggcctcttgctccacgatgtggtgtgtattttaggagtatcccaagtctggaatataggaatatccaagtaaattataggatataccaatatcattagttcttctgacctggctaatatgtatacaaagagccatagctcctccctttaattaattctctagagcatccacctgcttttctttctttcttttttttttttttttttttttgtgacggagtttgactctgtcgctcaggctggagtgcagtggcacaatctcggctcactgcagcctccatctcctgggttcaagtgattctcctgcctcaacctcccaagtagctgggattacaggcacctgccactaagcccggctaatttttgtattttttagtagagacagtttttctccatgttggccaggctggtcttgaactctggacctcaaatgatccacctgcctcggcctcccaaagtgctgggattataggcataagccaccgtgcccagcctaattttattttgtacttacccaaatactctaagtacttacccaaagactccctcattcatttattgattcattcattcagtgtatttactgagtgctactacgtagctctaaatgttggagatgcagtgataaacaaaataggcagtctttgccgttttgttttccatttttttaagagacagggtctcggccaggtgcggtagctcacgcctgtcgtcccagcactttgggaagccgaggcaggtggatcacctgaggtcaggagttcgagaccagcctggccaacatggcgaaatcccgtgtctactaaaaatacaaaaattagccaggtggtgggaagctgtgatcctagctactcgggaggctgaggcaggagaatggcttgaacccaggaggcggaggttgcggtgagctgagatcgtgccactgtgctccagcctgagcaacacagcaagactcattctcaaaaaaaaaaaaaaaagaaaaaagagggtctcgctctgtcacccatgctggagtgcagtggcacagtcatagctcactgcagcctcaaactccagggctcaagtgatcttcctgcctcagtctccacgctatctgtgactataagcacatgacaacacccagcctagtttttaaactttttttgtagagcatctcactatgtttcacaggctggtcttgaacccctgggctcaagggatcctcccactgcagcctcccaaaaatgctgggattacaggcatgatccactgtgcctggccacttctttgctctcttcagcttttgttctagtgtcttcagtttggatgatactggtcagaccattttctaggagcaggatcccaattcttcaagttcctgctcttcctgggtagttcatagaatcttctggccctttgtcctaatccaacaactgcagagtacatagaaaagcaggtagggctgggcgcggtggctcacacctgtaatcccagcaccttgggaggccgaggcaggtggatcacgaggtcaggagttcaagaccagcctgaccaacatggcaaaatcccgtctctactaaaaatacaaaaattagccaggcatggcggcgagcgcctgtaatcccagctactcaggaggctgaggcaggggaatcgctggaacctgggaggtggaggttgcagtgagctgagatcatgccactgcactccagcctgagcgacagagcaagactccatctcaaaaaataaataaataaatttaagttagccagatgtagctggttagtctcctattggacagttctagaccatactccatgcccttgggaaataatataaatgagacagttttccaaaggtaaataagcttcaggaatgccaacaaagtgctgctagctctttgtatggatgaatctatcagaatgatcactcttctggccttccctgcttcgaaacaggccatctgccccttggtgttgagtatcccagtagccattgggttctagaccaagctggacacagtgattcttgtgattcaaatgtttctcctcaactgaaaaagctcagggtgtcttttggactgtccctcaaaacctagctttccactaattagtgaagcatgacttttccatgccatgtctgttctgggaagtttcctcttcatcgtggccttgggccccagggaaatttcagtggatgagcagaagaagtggaaaaggggatgaaaagtcaggtggaatgacatcatccatcattatggcatcatcacagctcttacatcattgtcatcatagattgtcactgttatggattgattttcttctgattcttggtatccatttcttcacatgtgtttaaaactcttttgactgactgcttacctaacagaagtttcttgtgttgagttcctttgccagataaaaacaaaataaggctgggtacagtggctcacacctgtaatcctagcactttagaaggccaaggcgggcggatcacttgagatcaggagttcaaaaccagcctggccaacacggtgaaaccccgtctctattaaaaatacaaaaaagccgggcgtggtggctcacgcctgtaatcccagcactttgggaggccgaggcgggcagatcacgaggtcaggagatcgagactatcctggctaacacggtgaaaccccgtctctactaaaaatacaaaaattagccgggcatggtggtgggtgcctatagtcccagctactcgggaggctgaggcaggagaatggtgtgaacccgggaggcggagcttgcagtgagccgagatcgagccactactgcactccagcctggatgacagagcaagactctgtctcaaaaaaaaaaaaaaaaaaaaaattagctgtgcatggtggtgggcacctgtaatcccagctacttgggaggctgagacaggagaattggttgaacccgggagacagaggtggcagtgagccgagattgcaccactgcactccagcctaggtgacagagcaagactccatctctaaataaataaataaacaaacaaacaaatggatttatggttatttatataaatcagttgcactcaaatacatatagccctccattgtctttaacctttttaagagacagggtctctctgtcacccatactgaagtaccatggtgcgatcacagctcactgcagcctcaaacacctgggctcaagcaatcctcctgcctcagcctcccgagtagctgggactacaggtacatgccaccacacccagctgacatattttcattttaacttttttatagagacagggtctccttgtgttgcctaagttcattgtcttactagtgcattctttaatatgttttgatatttgacctctaagagagctgtatacattcacattagctggaaactctaattctttattccttcaactctactctatggatttggaagctctagctatggcaaacactccctcggtttgttaaaatgtgtggttgtggttggaacccacctccctgatactggcaccactggccttattcctgcctttgtgggccacagagatccaacccctcttcccacataccaggcctccagctccttctcctctctaggaacccaaagtttgagtctagtcctggcttctttatccttccagtcaccaattagagctcagaaagcaggtcaaataagttagaattttttttttaagttctgggatacatgtgcagaacgtgcaggtttgttacacagctatatatgtgctgtggtggtttgctgcacctatcaatccatcatctaggttttaagccccacatgcattacgtatttgtcctaatgctcttcctccccttggcccccattccctgacaggccccagtgtgtgatgttcccctccctgtgtccacgcgttctcattgttcaactcccacttatgagtgagaacatgcggtgtttggtttctgtatgtttactgcattactatttacaatagcaaagacttggaaccaacccaaatgcccaccaatgctatcactggattaagaaaatgtggcacatatataccatggactaccatgcagccataaaaaattgagttcatgtcctttgcagggacatgcatgaaactggaagccatcactctcagcaaactaacataagttagaaattttaatttatttttgtttgagacagaatcttgctctgtcacccaggccgagtacagtgatgagatcatggctcactgcagcctccaccttctaagctcaagcaatctttccacctcagcctcttgagtagcttggactacaggcacgtgccactatgcctggctaattttttgttttttgtagagacaggggtctcaccatgttgccgaggctggtcttgacctcctggcctcaagtgatcctcccgcttttgcctctcaaagcactggggttacaggcatgaaccaccatgcccagccagttagacgttttttgtttttttgtttgtttgtttgttttttatgtgatggagtctcgctctgtcacccaggctagagtgtagtggcgcaatcttggctcactgcaacctctgcctccgagttcaagcaattctcctgcctcagcctcccgaatagctgggattacatgcgtgcgccaccacgcccggctaatctttgtatttttagtggagatggggtttcaccatattggtcaggctggtcttgaactcctgacctcgcgatctgcctcccttgggctcccaaagtgctgggattacaggcgtgagccaccgtgcccggccttagacatttttatatttggtttgtggctgtgatcaaagccatttgggatgtctgcccagccctaccctcttcatatgagcacatccaaccctcaattgcagccctgcgcatagggttcagctaagccacacccagattcctgacccaaagaaacagtgagataataaatgttttaggcctctatactttggggtaatttgttacgcaaccagagataagtaatatattgtcaaaaccaggtaggctttaattagtctttccagatgtctgtttctttctttgtgctggctggaggcctttggcttttatagatttcttttttttttttttttttttgagacggagtttcgctcttgttgcccaagctgcagtgcaatggcgtgatctcagctcactgcaacctctgcctcctgggttcaagtgattctcctgcctcagcctcctgagtagctgggattacaggtgcacgccaccatgcctggctaatttttgtatttttagtagagatggggtttcaccgtgttggtcaggctgatctcaaacccctgacctcatgatcggcccacctcagcctcccgaagtgctgggattacaggtgtgagccaccatgcctggccagaaatttttttttaagagatggggtctttctttgatgcccaggctggagtggtgggaggatgacttgagcacaggagcccaagagtagcctgggcaacacaggaagacctcgtttctacaaattaaaaaaaaaaaaaaaaattagctaggcatggtgcctgtggtcccaactactcaaaaagctgaggtgtgaggacggcttgaacctgggagttcaaggctgcagtgattgcaccactgcacttcagcctgggtgacagtggagaccctgtctcaaaccaaaccaaacaaaacaaaacaaaacaaaagaagctattggagggccttataagctgcctcagaaccaaggacttcctaactttctcttgtttctccccatctcccaagcacagggaggggctctctttggaagttcccttatttgactgatgaaaacttcttccaaaagaaatgcagttgtcttaagatgactcctccctaagaatctcatcaaatatccaggaaatattaaccactggcaaagagaaaagactaaaaattggcatcatgtccaaacagacttcatctactcctctctgtgcagcttggagagattacatgggagactttatctacataataagacggcctttgttcacaatgaagttctgccctcacctttctgtcgcctccccaagagctcagaggaactttgtcccaggccactgtctgttcattgggcttcatcagttcccctgaacatcattcatttcccctcaaaactgcctacattccccatttctctctcccctaggaagacagtatttaactcacaaccatctggtccttctttgagtcccacttttttttttttttttttttttttttttgagacggagtctcactgtcgccagcgctggagtgcagtggcgcaatctcggctcactgcaacctccgcctcccgggttcaagcgattctcctgcctcagcctcccaagtagctggcattacaagtctcacattttatatggctcccatgcttacgcataaatgtctgtgccctttcttttgttaatctgtctattgtcagctcatttcagtgaaacttcagaacgtgaaagggaagttttccctttgccctatgccttcctttccctgtatcaattcctttggccccaccagaactggcctgcatttggtatctttatagaacagcctctttgtatcccaggctgatgttcaggctccatcacttgccctgtgcattaagtagtaacagtgagactctacaagccaaggcttctcattctcccctctctaggaagtcctgctcccaagatgacattctgtgccttttcagtcactaactcttggttcaggtacaagacaagggctcaagcaaaatccagatggactgagtgagattattggggtgaaatgcagttccctctcattcctggggatcagcgagcatgcctccctacagcacaccccccacctgactcattctgcctcatccaggtcagaggtccctccttacaggagttcttacagaaaccaactgaggtctgcttacccagcacagtaaaaccagatacccacactaaggtctttgcagtgatagaaagaaaggtgtttattgcagggcaccatgcaaggagaatcagggcagctcatgcttaagacctgaaatcaccaatggcttgcaggtgggggttttttaaggcaggtgtaaatttcagtaaaccagaagctacaagcaaaatcataaatcaatgcatggagattacacattggtttccacttaaaaaggcaggatatcttaaagtgggggcttacaggtcgtagatagatttaaacatctaggcagggcacggtggctcacgcctgtaatcctaatactttgggaggccaagatgggaggattacctgaggtcaggagttcgagaccagcctcgccaacatgacgaagccctgtctctactaaaaatacaaacattagccggatgtggtggcacatgcctgtgatccttgctactcgggaggctgaggcaggagaatcgcttgaacctgggaagttgaggttgcagtgagccgagatcatgccactgtactccagcctgggcgacagcaagactcagtctcaggaaaaaaaaaagaaaaagaaaaaaatagaaagcctgggcgcagtggctcacgcctgtaatcccaacactttgggaggccaagatgggaggattacctgaggtcaggagttcgagaccagcctggccaacatgacgaagccctgtctctactaaaaatacaaaaattagccggatgcggtggcacatgcctgtgatcctcgctactcgggaggctgaggcaggagaatcgcttgaacctgggaggttgaggttgcagtgagccgagaccacgccactgcactccagcctgggcaagactcagtctcaggaaaaaaaagaaaaagaaaaaaataggctgggcgcagtggctcacgcctgtaatcccaacactttgggaggccgaggcgggtggatcacgaagtcaggagttcaagccagcctggccagcatagtgaaacctcgtctctactatagatacaaaaattagctgggcatggtggcaggtgcctgtaatcccagctacttgggaagctgaggcaggagaatcacttgaacccgagaggtgaaggttgcagtgagccgagatcacgccacaggactccagcttgggcaacagagacttagtctcaaaaaaaaaaagaaaagaaaaagatttaaacatcttctgatttgcaatggattaaggaagagaagctttgtttaaaaattttgagtcagtagaaacatgtcaactggttaggggaagtaactttctccaagcccctcaggaggaaacttggaacaaaagggacataaagtttagtcttcacttcccccttatctggggtttccaagactctgaaagacaattcagggacatatgttaagatgttatctttaatttctatagggaaaccaaacatctctgggactctaacttccttagcttttgttttggatcattatgtcttttttgtttaacaagttacttatttacttctcaaggctagctaggggcctggaatttcccttgaaggaactcagaaatttcctttgtttccatgcttggggtctcgtaaaaaaggggatccctgctctgtctcagggtcttactgaccctcactccagcccattctcaaacaccctaccctctttaaaaatttctctggggttaggccgggcgcagtggctcacgcctgtaatcccagcactttgggaggccgagacgggcggatcacgaggtcaggagatggagaccatcttggctaacatggtgaaaccccgtttctactaaaaatacaaaaaattagccgggtgttgtggcgggcgcctgtagtcccagttactcgggaggctgaggcaggagaatggcgtgaacccgggaggcggagcctgcagtgagccgagatcatgccactgcactccagcccaggcaacagagcgagactccgtctcaaaaaaaaaaaaaaagatttttctggggtctcatggtcttttaagtcaaatgcatacaacccaaaacagtatagctcagaggacaagggaacaaggtttagcatgagcagttgtaggtcagctcctccacccctcactaactgtgcgacttaacctctctgggcctgtctcaccatctgtaaaacagaaatgatgaaaagtatctaccttctaggggcattctatgagattatgcatgtgtgagtgagcaccaagcattgctcagtggtgcctagtgggtagtgagcactcagtatgcagcaccatgactatgtaagaattcatttgttagtagagcccggctttagaacagagatggaacctggcaccgaataataaagcatggggaggccgggcgcagtggctcatgcctgtaatcccagcactttgggaggccgaggtgggcagatcacctgaggtcaggaattcaacaccagcctggccaacgtggagaaaccccgtctctactaaaaatactagctgggtgtggtggcgcatgcctgtaatcccagggctgaggcaggagaatcgcttgatcccggaaggaaggtggaggttgcggtgagccaagattgtgcctttgctctccagcctgagcaacaagagcaaaactccatagatagatagatagatagatagatagatagatagatagatagatatagatatatagatatctatagatctatagatatctatatatatatatatagatatatatatatatcaggaggaatagtagtaatattgtcatcacttctcaccctgtctttgataaattgccagttgaagtgtctgcttcatcactgagaaaagagtgtgttctttcctctctgaatccccaggaccagacatatagcaggtgtccaatgaacagctcagctgttgaatgaacaaatagattctgttaggccctacaaggcataaaagtaaattcagtctgggcacagtggctcatgcctgtaatcccagcactttgggaggccaaggcgggcagatcatctgaggtcaggagtttgagaccagcctggccaacatggtgaaaccccatctctactaaaaatacaaatattagccaggcatggtggcgggcacctgtagtcccagctacctgggaggctgaagcaggagactcacttgaacctgggaggcagagggtgtagtgagctgagaccacaccactgcactccagcctgagtgacagtgagactccgactcaaaaaaaaaaaagtaaattcaaaagccattcacctgtgcagaaggcagggccaggctaatctgaaggctctaagagaagtatccacccacttcttctgtaaaaggccagatggtaaatattttagattctttgggctctctcttcctctgtggcaaccactgaattcaaccctgttgcagacatagacaatagataaatgaatgggcccggctgtttgtaggtaggtgaaaaatggcttcccttcacctttataggttctttggctgggctacgaattaaattgacatgtaaacagacagggcaaaagccatatttaattatgtacctatgcaggggagtcccacaaaatacaagactccaaaaaggatcagagaggctgggcccagtggctcatgcctgtaatccaggcactttggaaggccaaggcaggcagatcacctgaggttgggacttccagaccagtctggccaacatggtgaaaccccatctctactaaaaatacaaaaaatagccgggcgtggtggaaggtgcctgtaatcccagctactcgggaggctgaggcaagagaatcacttgaacctgggaggtggagagcgcagtgagctgagatcacgccattgaactccagcctggaccacagagcaagactccctctcaaaaaaaaaaaagtatcaaagaaaagaataggggtttggggcttctgggaggatggtggtaacacaagttatgggagggtaaggggagaaattgtatgatggagaaagtctgtcttgttaagcaaataaaaaagtcttgcaggtaataaaagttgtctcagagcagccctcagaaggatacatgattgggaatggtttcactcttccctagttaataagatcgtaggaaagcattcctctttctgtctttaggcagataagagaaattcagagaaaacctctccttccctgcatttgctgttcccccaagtgcccttattttgaagcaatcagcagacaaaagcgcatatccctgtgttccaatgaaattttatttacgtacgctgaaatttgaatgttttattttcataagtcgtaaaatagtttttcccccacctaactatttaaaaatgcaaaaacagagcagtggttcacgcctgtaatcccagcactttgggaggcaggaggattgcttgggccctggagttcgagactagccggggcaacatagtaagaccttgcctgtgcaaataatttttcttgagacggagtcttgctgttgttgcccaggctggagtgcagtggcgcgatctcggctctttgcaacctctgcctcccgggttcaagcaattcttttgcctcagcctcccaagtagctgggactacaggggcccgccaccacaccctcgctgaccggctgcagcgcgcaggacagcacgcctgggagggcggtgccaggaggcgggcctcggattgggcctcacgtagtgggctggacagaggatggagcctcttggcgtaagcgcggttgggcggggcattcctggattggcccactccggcgtcgcagaacgcttggcgtatcgtccttcagccaatcagcgtggagctgctgcctcgccccgcctcacgccggcgtcctgggggcgcggagagggcgcccaggttcaccgcgctctcagcgcgcacttccgggcacggtcagggcgtgacgtcgggaggagggcaggtaagtgccggcgggcggaggagcggggagggccgggggtccggcagccgcctcaccctggcctcggagctgcccggcgcgcccttccgcgtcgggggacgcggagctgaggacccgatttagatgcccggagccggcccaggtcccagccaggaccaaagtccctgaggccccagctgagacctctgacccaagtgcccgggacccggtcccatcctagcccggatccatattatgcctgaagggtcctgggtttttgcatcgggaaaatgggaccaataagtccctatctcaccagattttataaaaatgattcttgtaaaaccgtgagcagcagaaatgactaaactgccaaacgtttaactcggcgtcaggcgctgccctgaatgccttaaccagccatttttacacataaggaaaatgaggcttagagagagaaaacaatttgccccaagtcaagcagataggaagcagcagggtggagctccgagcccaagccgtaagcccaggacaaacagggtcggtaattacttttgcaccaaggaccggagatatctacacgcccacccgatagccccgtctgccatttactggggtaacaaaaccatcttaagacacacacacaccctcgagctcctgtaaacggagtatttgctctttgcaggctcttcccgtgggttagttgattcacagcatccccagaaagtcagtcttgtcgtcgtcattcgccctttaccggtgacgaaatacaagcccagggaagcgcagtcactgaccaaggtcacccagctgatgaggagtggagctgggattcaagcccagggagccgtgtcccctaacgcctcaaggggcacttagctattttgttggcaaaagtatttttaggttggaagggaccttggaataatccaatctaaaggacacactttatagttggaggatacaagactaaggtgagggtagaacagtttatatccgggactttgcaccactgcctcaccacctcactacaccactcccactccatcagaagctcttccatcagcttctttctttctttttgttggagacagaatctcactcttgtcaccttggatggagtgcagtggcgtgatctcggttcactgcaacctccgcctcccagattcaagcgattctcctgcctcagcctctccagtagctgggattacaggcgtacgccaccaggcctggccaatttttgtatttttagtagagacagggtttcaccatgttggccaggccggtcttgaactcctgacctcaagtgatccacctgcctcagcctcccaaagtgctgggattacaggcgtgagccaccgagtccggcccccaagaatggttttaaattttctagtagttggggaaaaatcaaaagaataatactttgtgacatgacgattatgtgaaattcaaatttctgtgtccatcaataaaatttatattggcatgcagctacgcccgttcatttatatattgtttgggactgatttctagctatgaaagcagagttgagttgttggggcagagataatctggcctaaaaagctagaaatacttattttctggcccttgacagagaaactttgccaatctctgttctagaatacccttcactgcttcacagagtctctctttagtgtaaactagaacttctttcttttttttttttttttttgagatggagtctcgctctatcgcccaggctggagtgtggtggcgcaatctttgctcactgcaagctccgcctcccgggttcacgccattctcctgcctcagcctcccgagtagctgggactacaggcacccgccaccacgcccagctaattttttgtattttttagtagagacggggtttcactgtgtttgccaggatggtctcgatctcctgacctcatgatccacccgcctcggcctcccaaagtgctgggattacaggcgtgaagaacttccttctatatgacctaaaagcctcccttccaaacatgagagggggtctcaccacccctagtttgaggagcccctgcatttcccacctgtgtcacctgcactgactgtgacccttatggagcctcattcagttatctcagttgtttacccagttgacatttatctgggcctggcactgtcctaggtgttagggatatggcacagtgtgacctgccgggggagacataaaccgacacagggtgatatgatcagaattccaggaaacaagtgactatggattggatggttagatgagttcattggttttttttgtttgtttgtttgagacggagtctcactttgtagcctaggctggggtgcagtggcgccatcttggcttactgcaacctccgcctcccggtttgagccattctcctgcctcagtttcccgagtagctgggattacaggcatgcaccatcacactcggctaatttttgtatttttagtagagatggggtttcaccatgttggccaggctggtcttgaactcctgacctcaggggatccacctgcttcagcctcccaaactgctgggattacaggtgtgagccaccgcacctggccggatgaggtctttgatggatatgatatgtaggtcaagacctgtgacagggggctgggtgcagtggcttgtgcctgtgatcccagcactttgggaggccctaggtgtgtggatcacctcaggccaggagttccagactggcctggtcaacacagtgaaaccctgtctctactaaaaatacaaaaaaattagccaggcttggtggcgggtacctgtaatcccagctactcaggagactgaggcatgacatcacttaaacccaggaggcagagatagtgagccaagatcatgccaccccactccagcctgggtgatagagtgagactccgtctcaaaaaaaaaaaaaaaaaaaaaaagcctgtaacaaagagcttgcaaacctgaggaacagcaggtgcaggccagctgcacttggcctttgaagacagccaggaagccagtgtggctggaacagagtgaacgagagatagaggggtaagagttaggcttggagaggcaggcaggggccccacaggccgtgggaaggggtttgacttgattctaaaaaccatatgaatcatgggaggggtttaagcaggagagtgacacgtttgttcatattaaaagatcccagctgggcatggtggctcacacctgtaatgccagcactttgggaggttggggcgggtggatcatgaggtaaagagatcaagaccatcctgggcaacatggtgaaaccctgtctctattaaaaatacaaaattagctgggtgtggtggcgcacgcttgtagtcccagctactcgggagactgaggcaggagaatcacttgaacccaggaggtggaggttgcagtgagcagagatcgcgccactgcactccagcctggtgacagagcgagactccatctcaaaaaacaaaaagatcccctgggcagctgtggggtgagcaagtgtcaagggcagagtcgggagagagaagaccgtgctggcccacgtgagtgatgatgggtgctggacccggtgggggccacagagggatgaaagtgtcagatgtgatgcgtatattggctgtagagtggacgggactctctctttctaaacagacacgccgctttttggatgcctcctatgcctggcgggagtcttgtctgagctggcaccaccacacggcccacgacatcttcgcagggaagcctgtggaccctctgccaggctccacaagaggtcaggacagtgcagtgtgttcacaaggccagtttctgatcgtccgccccgaggctgaggaccagtaggcagctcccaagatggtgagtagacagcctcgtgtgccctgggtttctctcccagtctttgtaggaccctggaagcagcccctcctcccctcccagagctctaagatgatgatttcaatctccgggtcatcatcttttggtgcagtgggtctgaaatgtggctttgcgctaacatcacccatgggcactttttaaatgtttttttgtttcattttcttttgtttttgagacagtctcactttgttgcctaggctggagtgcagtggcacgctctcggctcactgcaacctccgccttctgggttcaagcaagcacgtcccactaatttttgtatttttagtagagacggggttttgccatgttggtcaggctggtctgaaactcctgacctcaagtgatccactacactcaacctaaatttccccttccccctttcccctccccctcccctaccccttcctttctctttctttctttcatttttttttaacaaggtgaaattcatataacataaaattaaccattgcaaggccaggcacagtggctcacgcctgtaataccagcagtttgggaggccaaggcaggcaaatcatttaagattaggagtttgagaccagcctggccaacatggcgaaaccctgtctctactaaaaatacaaaaattaggctgggcgcggtggctcacgcctgtaatcccagcactttgcgaggttgagctgggtggatcacctgaggtcaggagtttgagactaccctggccaacgtggtgaaaccccgtctctactaaaaatacaaaaattagccaggcgtgttggcgggagcctgtagtcccagccactctggagggtgaggcaggagaatcgcttgaacccgggaggtggaggttgcagtgggctgagaacatgccaccacactccagcctgggcaacgaaagcgaaactccatctcaaaaaaaaaaatacaaaaattagttggatgtggtagcacattcctgtagtccctgctactcaggaggctaaggcacgaggattgcttgaactcaggaggcagaggttgcagtgagccaagattgcaccactgcacccaagcctgcgtgacagagcaagactctgtctcaaaaaaaaaaaagaagaaaacaagagcgactcttcagccaggctcagtgttctttcttgagacctgtgttcaacggtactacatgtgtatctgcccagtggcaatgttaaatacttcttaccgtcaatcacagtctccaaaagagtgtgaaagccaccataggagcatctgaacctcatggaattttccaaagcaatgacaatgggttttttgcccaagtagcccttccccaatcagacactgagcccagcactgtcctctaaaatgtccccaagtcccccttatccaggtcctgccccctgaggctgcacaagtaggtttcctggagggagcctgtgtattagtccagtctcacgctgctcataaagacatacccaagggctgggcgcggtggctcacgcctgtaatcccagcactttgggaggtcgaggtaggtgggtcacaaggtcaggagttcaagaccagcctggccaatatggtgaaactttgtctgtactaaaaatacaaaaaaattagctgggcgtagtggcacatgcctgtaatcccagctactcgggaggctgaggcaggagaattgcttgaatccgggaggcggaggttgcagtgagatgagatcgcaccattgcactccagcctgggcaacaagagtgaaactctgtctcaaaaaaaaaaaaaaaaaaaaaaaagacatactcaagcctgggtaatttataaaggaaagaggtttaattgactcacagttcagcatggctggggaggcctcaggaaacttaacaatcatggcagaaggggaagcaaacacatccttcttcacgtggcagcagcaagaatgagcaagaggaaaagctccttgtaaaaccatgaggtctctcgagaactcattcgctgtcatgagaacagcatgattcgcccccatgattcgattcagttacctcccaccaggtccctcccatgacacgtggggattatgggaactacaattcaagatgagatttcgcctgtaatcccagcactttgggaggctgaggtgggtgcatcacttgatgtcaggagttcaagaccagcctggccaacatggtgaaaccccatctctactaaaaatacaaaaaattagctgggcgtggtggtgcatgcctgtaatcctagctactcaggaggctgaggcaggagaatcgcctgaactcgggaaacggaggttacagtgagtcaagatcgcaccactgcactccagcatgggtgacagagcaagactccatctctaaaaattaatagtaaaataaaaaatcagaaaaaatttttttgaatgagatttgggtagggacacagccaaaccatatcagcctctctctgagtcatgtctctgttctgctttgcagggtgaaaggaaaggggtcaacaagtactatcctccagacttcaaccctgagaaggtaagcaggctctccgctccaggtccacagtagcaaaaagacccacgtcatcccctcttggggttagagccactgctgcggaaggatgggtggcccccaaggtctttttgtcttctgcatgtcacctgagtctcgaggctgtcttcacttttgggtgataactgtggctctcctcagggacctgtaactccatgtccacactatactagagtatagtgtgtttacagcaggggcccaggataaggcagagcgcacagatgaagggtcagatcccatggcttccccagctccagcacctgtggcgtcctggttgtcccctctgcctggaatctcttcctccatttcaccatactctcacttccttaagtgcttttctcacagaggtcctccctgaccactgtctcgttctctgttgcattgctgagcactttatataatctcatagcccttataactccctcacttattcatttatttgcgtcttgtccatctcccccgctagaacattctctccctgaaggcagagatgttcatctatcttattgtggctgtgtccccacacagtaggtgctcagtaagggcccaagtgtcccagctgcctcgtcctgagtataggatttagcctctctatgccaaagtttctccatacgtcagaagggggaaataaaatgagctgacctcacagaatcattgagggataaatcctagctactcaggaggctgaggtgggaggattgcttgagcccaggaggtggagactgcagtgagtcataatcataccactgcaccccagcctgggctacagagccagaccctgcctcaaaaaaaaaaaaaaaaaaagccggcgccatggctcacgcctctaatcccagcactttgggaggccaaggcaggtggatcaccaggtcgagagtttaagaccatcctggccaacatggtgaaacttgatctctactaaaaatacaaaaattagctgggcgtagtggcccacacctgtagtcccagctacttgggagactgagacaggagaatcgcttgaacccggaaggcggaggttgcagtgagccgagatcacgccactgcactccagcctagtgacagagcgagactctgtctcaaaaaaaaaaaaaaaaaaataaggtgatgcacatgaagtccccagcgaatgtttgccagtcttgtcacctcacctcatcttccccataaaacctggaagtaataatgaccattatacgtagttgacagacaagggaaacagaggctcgggaaggcaaaacgtgaggtcactcgcccagggtcccctggctctttcagctcataaatgggaacagggctgggcgcagtagctcacacccggaatcccagcactttgggaggccgaggcaagtggatcacctgaggtcaggagttggagaccagcctgggtgacatggtgaaaccccgtctttactacaaatacaaaaaaaatagccgggcgtggtggcaggcgcctgtaatcccagctacttaggagcctgaggcaggagaatcacttgaacccgggaggcagaggttgcagtgagccaaggtcatgccattgcactccagcctgggcaacaagagcaaaactccatctcaaaaaataaataaataaataagagagggactattcaaactcacgttcctggttccaagcctacatgttccagtaagacctggatgccccctattgctatgaacacccgtcctgcaggacataagaatcaaggcctctcccacctgtgagacacttgtcccaaagcagtgggggtggcagaaaattgtgagctcctccagctcagcagcactaatccgctcctcatcctctccacacagcatggctctctcaaccgataccacaacagccacccgcttcgggagcgggctcggaagctgtcacagggcatcctcatcatccggtaaggcccagcatcacctgaggaccccaccgtcctgccccattccttcagtctcaaggagagttcagtgccctcattggcccagtgctgcagggtcttcattccataaagcagaaagtcaccgtatcagtcagttattgccgtgtgacaaaacaataagcatttattattgctcacatgtctgcagctcagcaaaatatctctgctgggcttggaagagcttggctgggctgggctaggctggcctgatctgggctgggctcccatgtgtttcagagttggctggctggggactggctggtttagcagggacttgacctgtacagctgggctctgctccgtgttgtatctcaacctgtagcaggccagcctggacttgatcacataggactctcaaaaaagacagtgatcgtagttgggcacagtgggtcacgcctgtaaacccagcactttgggagggtgaggcaggtggatcacttgagaccaagagttcgagagcagcctggccaacacagtgaaaccctgtctctactgaaaatagaaaaaattaggctgggtgcggtggctcacacctgtaatcccagctcctcgggaggctgaggcaggagaatcacttgaactagggagctggaggttgcagtgagccaagaccatgccactgtactgcagcctggcaacagagcgagactccatctcaaaaaaaaaaaaaaaattcgccggaattggtggcgcacacctataatcccagctacttgggaggctgaggcataagaattgcttgaacccaggaggcagaggttgcagtgagccaggatcgcaccactgcactctagcatggggaacagagcaagactctgtctcaaaaaaaaaaagtcgcagcagcacccaaaggcggctgtccctggacctggtcagtctgctttctagcaggcaggaagttcctgctcagttacaatggttgtgattctttttcttccatatatccatttcctgtgtaatgtgagtgcagcaactcccgttaacagggcagtctaataccccacccctcaaatcacaaccgcggccagagtcgcaggtgtggagacccagggagtgtccaagtggacaagtgcaagtaagatgctgtctgtctttgcagattcgaaatgccatataacatctggtgcgatggctgcaagaaccacatcggcatgggtgagcctctgcccaccctccattcagtcctgcaaacatcagaccccctaactgctggatgccgccggggtgggggtgggagggtcctgatcaggaatgagggaggagacgggcacccgagtgactggctggccatggaagcccctttgcagagggattaggaagccaggctctggcttccaatcccgtctctaactcctcctagttggggaaccctcagcaagtgacagtgagcctctttgtacctcattttacccatctgcaaaattcagatggcaatgaaattaccacccccgcctgacccccttccaggtgttcgttacaatgcagaaaagaagaaggtgggcaattactacacaaccccgatctacaggtaagggcggcttggtggcatcttgggaacaggtggggtggccacagggcgagggggctacaaagagcctgagttgcggggggaacccattccctgcaggactcctggaaatcgccctggttggtgaatcagggcacaccccacccccgcaaccctccatggctcccaccttcctcagtaaaagcccaagtcctccccctggctcacaaggcaccacacactctgcctgtcctttcttcaccctaacctcctcctgctgtccccctccctggcctcctcgttgtccctcacacaccccagggacacacccacctctgtgcttccacctggaatgctcttccccaggtagctccaaggctcctccctcacccggggtttctgctcaaacagcacccctcagagacaccttttctaaagtgagacttgacactggttgcttgtgcccttgctatcaaggtgggccctgctgggacgtcagcctttccatgagcaagttggcttttccactactcagcaatttccccagcagctggcactgagcctgccacagagcagcctgtcttgggcgggtttgttgaataaatgaactagtggacaaatgaatgaacaaatgaatgaacagaatgaacaaatgataagtgaattaacaaatggatggatgagcaaatgaatgtatgaattactttaacaaatgaatcagtgaaccaacaaacaaatgcactaatgaatgaacaaatgaattaacgaataaatgaaccaaaaaaatggatgagggaatgaatgaatgaacaaacagctgaatgaacaaatgaataagccaactgcagccccactgacagaaggtccgttctgggtgcccggatgtgcccctttttgcccgtggctctacacggcacacagtgggtgctcagtgaatttttgtcaaatgacaccattgggtggaaggaagcaggcagaggcgacagggctgtcctggtgcacagccacagcctcctgactcctgcccaccgctccctcccaggttccggatgaaatgccacctctgtgtcaactacatcgagatgcagacggaccccgccaactgcgactacgtgatcgtgagtggcgcccagcgcaaggaggagcgctgggacatggcggacaatgagcaggtgctgaccacaggtgagcgccacccacttacctgcctgggggccctggccctgagtctgcgctggggcccccaaagcccagccgagctctgatcgttgcagagcatgagaagaagcagaagctggagacggacgccatgttccggctggagcatggcgaggccgaccgcagcacactcaagaaggcgctgcccacactgagccacatccaggaggcccagagcgcctggaaggacgacttcgccctcaacagcatgctgcggagaaggttccgggtgaggggggctccagcccggggtcagagaggatgcatggtggaccaaggcccgggtccagccctccccccaccacatcctagctttgagcaggccactgtaccctctgagcctcagtttccccatctgctacatggtgaccatgccctgtcttaatccattctggctactataataaaaaataccatagacagaaacagtagaaatttggctgggcacagtgactcacgcctgtaatccagcacattgggaggatcgcttgaggccaggagttcaagatcagcctgggcaacatagtgagacaccaccccccccctcccccagcatctctaaataaataaataatagaaattaattttttttttgttttgagacagtagtcatctcgctctgtcatccaggctagagtgcagtggcgcaatcttggctcactgcacctctgcctcctgggttcaagcaatcctcctgcctcagcctccagagtagcaggaattataggtacccaccaccaccacgcctggctaatttttttttttttttttgagactgagtttcactcttattgcccaggctggagtgcaatggcatgatcttgggtcaccgcaacttctgcctcccgggttcaagtgattctcctgcctcagcctcctgagtagctgggattataggcatgcaccatcacgcacagctagtattcttagtagagacggggtttctccatgttggtcaggcaggtctcaaactcccatcctcaggttatctgcctgcctcggcctcctaaagtgctgggatcacaggcgtgagccaccgcacctggccaatttgtgtatttttagtagaggcggggtttcaccatgttggccaggctggtctcgaactcccaacctcaagtgatccaccgtggcctacccaaagtgctgggattacaggcgtgagccaccgagaccagccaaaataaacaatagaattttatttctcatggttctggagtctgcgaagtccaggatcaaggcgctggcagatccagtgtctggtgagggcccatttctcataggcggtggcttctagctgtgtcctcatgtggcagaagggacaaacaagttcccttgagcctccttttataagtccaataatctcattggtgaggacgtagcccttctgacttaattacttccccaaatgcctcacatcttttaacactgtcaacgttgaggattaagcttcaacatatcaatttgggggacacagacattgagaccatagctcacccctacctcaccatgccatgggagatacctacctggttgcctccttttatttatttattttttttctttttgtgactgggtctcactctgttgcccaggctggagtacagcggcaaatcatgtctcactgcagcctcgatgtcccaggttcaagcaatcctccccactaagcctcccaagtagctgggacccacaggcatgagccatcacacctggctaatgttgggttttttgtgttttgtttttgcttagactgagtctcgctcgtcgcccatgctgcagtgcagtggcatgatcccggctcactgaagcctccaccccaggttcaagcaattctcctgcctcagcctcccaagtagctgggattccaggttcccaccactgtgcatggctaatttttgtatttttagtagagactgggtatcaccatgttggccaggctggtctcgaaatcctggcctcatgtgatccacccacctcaacctcccaaagtgctaggattacaggcgtgagccactgcatctgacctggccaccacattttaaatggaacctcttggctgggcgcggtggctcacatctgtaatcccagcactttgggaggctgaggcaggcggatcacgaggtcaggagatcgagaccatcctggctaacatggtgaaaccccgtctctactaaaaatgcaaaaaaaaattagccaggtgtggtggcgggtgcctgtagtcccagctacttgggaggctgaggcaagagaatggcgtgaacctgggaggtggagtttgcagtgagctgagatcgtgccactgcactccagcctggccgacagagcaagactcttgtctcaaaaaaatatagaattaaactaaattaaaaaataaatggaaccgcccagcccatcccctacccacctgtcctgcattttttttctccttatcactgtctcaccactagaggccagctccaccagggcaagggtttttccctgcctgccactgtatgccgagtgtccagaacaaagcctagcacaaggtgggtatcccagaaatatttgtgggatgaggccgtgcgtggtggctcacacctgtaatcccagtgctttgggaggctcaggtgggaggattgtttgaggccatgagttggagaccagcctgggcaacatagtgagaccccatctctacaaaaaaaaatttttttttttttttgaaacagtctcccccctttcgccctggctggagtgcagtgacaacgatctcagcccaccgcaacctccacctccccggttgaagtgattttcatgcctcagcctcccaagtagctaggaccataggcgcatgccaccatgcctggctaatttttatatttttaatagagacaggattttgccttgatggccaagctggtctcaaactactggcctcaagggatccacccgcctcagcctcccaaagtgctgggattacagacatgaactaccaggcccagtctctacaaaaataaatgttttaattagctgggcgtggtggtgcacatctgtagtactggatacttgggaggctgacatgagagaatcgcttgagcccaggagttcgaggctgcagtgagctatgattgtgccactgcactccagtctgggcgacagaatgaaactgtctcaaaaagagtaaatgagaccccgagagttggagcagtgccccctagtacacagaagagacagggctttgacaccccctatctctggtgttcttggccctcaacacaggaaaagaaaaaagccatccaggaggaggaggagagagaccaggccttgcaggccaaggcgagcctgaccatcccgctggtgcccgagacggaagatgaccgcaagctggcggctctgctgaagttccacaccctggactgtgcgtaggaggccagggggaaaaggggacagggaggctcagagttgcctggagatggggggtcctcagccatgagtggactctggtctaccagagggcagttctggaccccctcccctgccgcccctgaaatgtcctctcctctcctctagcctacgaggacaagcagaaactcaagcggaccgagatcatcagccgctcctggttcccctctgcccccggatccgcctccagcagcaaggtcagcggcgtcctgaagaagctggcacagagccgcagaaccgcgcttgccacctcccccatcaccgtcggggacctgggcatcgtgcggcggaggtctcgggacgtcccggagagcccccagcatgcggccgacacccccaagtctggggaaccgcgggtaccagaggaggctgcccaggaccggcccatgtcccccggagactgtcctccggaaacaactgagacccccaagtgcagcagcccgagggggcaggaagggagccgtcaggacaagcccctgtcgccagcaggctcctcccaggaggcagctgacacccccgacacgcggcacccctgcagtctcggctcctccctcgtggcggactactccgactcggagagtgagtgagcgatccccatcctggagactggacccgctctagaggcccggacacacccaggaggcccctcacagactgcagacccccggctcgcccaccagccctgggagagctcagatgccgcatcctccccagaccgcgccttcctgcaaccgtggagttatttatttggtcctggtgagggtgtttgtgccttgtgagactccgtacattaaagacctgtctcttcttccctgtcttgggttgttagatggaccctggggctgcccccccacccccccaccttgaccaagcttggtaggcctctcatcagcaaatgctggtatagggtcatagctgtgaccacagacatggtccccttccagagtaacaagagtctcaaggtggtggtcccggttggccaggaatcaggacagacttcctggaggaggaggcatgggccaagtgtgaagggtgaaaagggggccaggaaccacacacacaaggccagggacaaggcacacggggtacccaggatgtgtgccagatgcagcaggggctggagcacacaggtgtgagctttttattatacccagcccaggggtggcccatggaaaagccccccgtgcatgttacttttggggtttttttgttttgtttttgagaccgagtcttgctctgtcacccaggctggagtgcagtggcgcgatctcggctcactgcaacctctgcctcctgggttcaagtgattcttctgcctcagcctcccgagcagctgggactacgggtgtgcgccaccacgcccagctaattttttgtatttttagtagagactgggtttcaccatgttggccaggctggtctcgaactcctgacctcaagtgatctgcccgactcggcctcccaaaatgctgggattccaggcgtgagccacagcgcctgtcctgcatgttacttttgaatgaaaccgagcagaaaatggcccagaaacagccttgcatccatcaaggggcacacgaccccccactacctccccctcaaccttggaagatcatttaacaaattctttggtttgaacacttgatgttaccttgccactggggatacatccctaactctagacagcaggttgttaaacacggggcctggtatccactaggcgtcccataaatgctgccacttttgtggttccgaggaggcggctcactccgttcgggcttggcaggagtcgtggagtgggttcggccacgtggaatccgcgtcctgggaacccgtggaatccgcgtcctgggaacccgtggaatccgcctcctgggaacccgtggaatccgcctcctgggaacccgtggaatccgcctcctgggaacccgtggaatccgcctcctgggaacccgtggaatccgcctcctgggaacccgtggaatcgggttggatgcgcatgtgcgtgtctctttttccgggggaggctccgcccacggccccgccccgctcccaagtgcgcgcggacccctagctccctctgagttgcgctgggcttggctgctgcaccatgaccctggaggcgatccgctactcgcggggctccctgcagatcctagaccagctgctgctgcccaagcagagccgctacgaggcggtgggctcggtgcaccaggcctgggaggccatccgcgccatgaaggtgcagcggggcggcggggcggcggggcggcggggcggcggggcggcggggcggcggggcggcggggcggcggggcggcggggcggccgggttggaggtgggagtgcgcccgcgcctgcagcttccgacgcccaaatccctgccccgcaggtgcggggcgccccggccatagccctggtgggctgtctcagcctcgccgtggagctgcaggcgggcgccgggggaccgggactcgccgcgctcgtggccttcgtgcgcgacaagctgagcttcctcgtcaccgcccggcccaccgctgtcaacatggcccgcgccgcccgcgacctggctgatgttgcagcccgggaggccgaacgggagggcgctacggaagaggcggtccgggagaggtacggggatctggtaccaggcacggcgctgagcaggaattatattgactctttttaagtacagtgacccactatacagatggggaaactgaggcacggcgaccttaagtcccttgtccagggccccacagatggggagactgaggcacggcgaccttaagtcccttgtccagggccccacagatggggcccagagtctagcctgggcagcctggccctgaaacctaactccttaatcgtgcctcccctgaatacacgcagccccttatccgcccttggaggccctttttagtatctccgtgttctcttggtttctgcttttgaggaactttttttcctgtcctggtccccttcctgccatctttttccccccacttcctttctgctccagccctccctgcaatgtcactttaccccaccaagctcgagcctgccttacagcctttgcacgtgccattggtgcgggccaggtatccatagcgccctcctccaccattctatatgatccagctcacccgctgctctctgttgcctgattctgccggcttttccttcattttattatctcttcatcagctggctcactcaccccagtgtcaactccacaggagcagagatttttgtcttgtttactgctgggtcataccggaactgcttggtaaacatgtctttgcatgaatgaacggagtgacacttcggtggccctggccgaagggtccaggccccacagcaatgagaggctttgagcaggagggctccaggacagcagcgttaggcagagaggaggcgttggcctgggccccgggtcctggtggctggtgctgaaaactccttgtcaccccagagtgatctgctgcaccgaggacatgctggagaaagacctcagagacaaccgaagcattggggacctaggagcccgccacctcctggagcgggtggcccccagcggtggcaaggtgactgtgctgacccactgtaacactggtgctctggccaccgctggctatggtacagccctaggtgagagggcctcctcagggggtaggggagggccttctaggaacttttttagatacaagagaaagaatcccaaacccaaaccactttatccacaaaaaaaatgggaaggtactagttctagtacggaaacacttatacagttggcttcaggtatggcaagatcaaggggctcaaccagtagcatcaggacctatctatctctgtgcttcagctctgccctccttcatcttcaggttccatgggctggcaggcggctgttagggtccaaatcatgaggaaaagagcctcctatactagaaaagtctccttgtatctcagggggtccactagggcacctgcccatcccagagcagtcattcgatgggccccgcctgagccatatgcctagagccagggcaggacgtggactccaggaggaactggggagaagggagtgagcagagaaagattaggtagctgtgaccaggagacagggggagtgggctgtagggggccaaggcagcagattccacttgaccctaaattcaccaggaaatttccctacctgcctgagtcccaccttcatccctgggaactgaggccttaatggaaagacctctgcctttgattcattcactcacccagcatttagtaagcacctgctgtggctcagacaccgccatttgctggggacgcagcagtgaacaaaacagacaaaatctctgctctcaggggtcccagggaagcagaaggaacagtcaacaggcaaaataagtacagtcatccttcaatatctgtgggggactggttccaggacctcccacagataccaaaatccatggatgctcaagtctctgatataaaaatgccatcatatttgcatgacctatgcacatccacatatatatatatatatatatatatatatatttttttttttttttttttttttttttttgagacagagtcttgctctgtcgcccaggctggtgcagtggcatgatctcagcttactacaacctctgcttcccgggttcaagagattctcatgcctcagcctcctgagtgtctgggattataggcgtgagccactacgcccagctaatttttatatttttagtagggacggggtttcacgacattggccaggctggtctcgaacttctgaccttaggcggtccgccagcctcggcctcccaaagtgctgggattacagacgtaagccacagtgcccagcccacccctatattttaaatcgtgtctagattgcatatcatagctagtcccatgtaaatactatgtaaattgttgttactggctaggtgtagtggcggtgcaggcctgtaatcaggaggctggggtgggaggattgcttgaactcagaagttctagaccagcctttgcaacacagcaagaccctgtctctatttttaagcctgtaatgccagcacttcgggaggccaaggtgggcggatcgcttgagctcaggggttcaaaaccagcctgggcttcatggcaaaaccccatctctacaaaaaatactaaaattagctgggtgtagtggtatgcacctgtggtcccacctattcgggaggggactgagatgggaggattgctttttatttatttatttattttggagacagagtcttgctctgtcacccaggctggagtgccatggcacgaccttggctccttgcaacctctgcctcctgggttccagcgattcttttcaagtattttctttctttcctttttttttttttttttttttttttgagacagagtcttgcactgttgcccaggctggagtgcagtggcgcagtctcggctcactgcaagctccgcctcccaggttcacgccattctcctgcctccgcctctcgagtagctgggactacaggtgcccgccaccacgcccggctaattttttgaacttttagtagagatggggtttcaccgtgttagccaggatggtctcgatctcctgacctcgtgatccatctgcctaggcctcccaaagtgctgggattacaggcgtgagccaccacgcccagcccaaatattttcaatccacatggttgagtccatggatggagaacccatagaaaaggggggctgcctgtacacatgaggtgttagaaggtgataaatgctaaggacagagagcaggaaactgaaagtgtggggattgctatgcaaaactgatatatcagggaaggcttcaccgagaaggtgtcctttaaacagacgtgaaacggagctatgcgagcattgggaagagcataccaggcagagggaactgccactgcgagggcccctgggcgggactgtgctcggtaagcctttggcaatccacgcccagactaggagcctgcacccctaaccaatggaccaccctgtctgtttgcccctccccggggccttctcctggtgggtggggcccccgcaggtgtgattcgctcactgcacagcctgggccgcctggagcatgccttctgcacagagacccggccctacaaccagggagcccggctgacggcctttgagctggtctatgagcagatccccgccacccttatcaccgacagcatggtggctgctgccatggcccataggggcgtgtcaggtaagcagacggtaagccctgggggcggggctctggagcatggggccaggtaatgacccccaacttctcatacgccccctccccagctgtggtcgtgggagctgaccgcgtggttgccaacggcgacacagccaacaaggtgggcacctaccagctggccattgtcgccaagcaccatggcattcccttctacgtggctgcccccagctcttcatgtgacctccgtctggagaccggcaaggagatcattattgaagagcgaccgggccaggagctgaccgatgttaatggggtccggattgcagcacctggtaagctgccccctcagaaaggggacaccccagctcctgggcacttcatggaggcaggtgatatgcaggtccttgtcatccttctggaacatacacagctcctacaagccactttttcttttttcttttttttgagatggagtcttgctctgtccctcaggctagagtgcagtggcacgatctgggctccctgcaacctccacctcccgggctcaagcagttctcctgcctcagccccccaagtagctgggactataggtgggtgccaccacgcctggctaatttttgtatttttagtagagatgaggtttcaacatgtggaccaggctatttattaactactgacctcaagcaatcagcctgcctctgcctcccaaagcgctaggattacaggtgtgagccacagcacgcctggcccaagccacttcttctaacaggtgcatcctggaggtcagatccaatgttggaatttacaactaaccggttatatgaatgatcttgagtaactgtcttgctattctccacttaggttttcttaagaggaaataagaatatctggctggccacgtgtttgtaaagaaaaaccaagacggccaggcgaggtggctcacacctgtaatcccagcactttgggaggccgaggcgggcagatcacaaggtcaggagttcgagaccagcctggtcaacatagtgaaaccccgtctctactaaaaatacaaaaattagccggacatggtggcacccgcctgtagtcccaactactcaggaggctgagggaggagaatcacttgaacctgagaggcggaggttgtggtgagctgagattacaccattgcactccagcctgggcaacagagtgagattctgtctcaaaaaaaaaaaagaaaagaaaaagcaagatatttctacacttatttttatttgtttattttcatagagatagggtctcgctatgttccccaggctggtctcaaactcctggcctcaagcgatcctcctgcctcagcctcccaaagcactgagattacaggtgtgagctcccatgcctagctgcaagacttttcttagctgcctatacttcctggctgtgcaaccgttagcaagttccctaaattctctaattccctaagatcctcactggtcctatctgtaaaatgggctatggctagaacctgctgcataaacccaagggcggtcagtgaattaacccacaggacatttagatcaatgactggccctttaaatagttcatgcactcagatgccgtggctcacgcctataatcccaacactttgggaggcggaggtgggcggatcacttgaggtcaggcgttccagaccagcctagccaacagagcgaaaccacgtctctactaaaaaaatataaaaattagccaggcgtggtggcacatgcctgtagtcccatctacttgggaagctgaggcatgagaattgcttgaacctaggacgcagaggttgcagtaagttgagactgcaccactgcactccagtctgggtgacagagcgaaactccatctcaaaaataaaaaaaaaggccgagcgctgtggctcacgcctgtaatcccagcactttgggaagccgaggcgggcggatcacctgaggtcgggagttcaagaccagcctgaccaacatggagaaaccctgcctctactaaaaatacaaaattagccgggcgtggtggcacatgcctgtaaccccagctactcaggaggctgaggcaggagaattgcttgaacccgggaggcggaggttgcaatgagccaagatagcgccacagcactccagcctgggcaacaagagtgaaactccatctcaaagaaaaaaaagaaaaaacagttcatgaaatattagcatgaaccaatattagcattatggggccaggtaaaatggctcacacctgaaatcccagtattttgggaggctgaggtgggaggatcacttgagctcaggagttcaagaccagcctgggcaacattgccagaccacaatctctaaaaaaattgttttgccaggtgtggtggttcatgattgtaaccccagcactttgggaggctgaggcgggcggatcacctgaggtcaggggttcgagaccagcctggccaatgtggtgaaaccccgtctctactaaaaatacaaaaaaaaaaaacgttagctgggcgaggtggcaggcgcctgtaatcccaactacttgggaggctgaggcaggagaatcgcttgaacctgggaggcacaggttgcagtgagttgagatcatgtcactgcactccagcctaggtgacaagagcaaaactccatctcaaaaaaacaaaaaaacagctagacatgatggtgcacatctgtggtcccagctgctcaggaggctgcagcaggagaatcgtttgaatccaagaggcagaggttacactgagccaagatcgcaccactgtactacagcctgggtgacacaacgagactctgtgtcaaaaataataataataattaaaaataaaactaaaaaaataagtgggatgggccaggtgcggtggctcacgcctgtaatcccagcactttgggaggccgaggcgggcagatcacctgaggtcgggagtttgagaccagcctgaccaacatggaaaaacctcgtctctactaaaaatactggctgggcatggtggtgcatgcctgtaatcccagctactcgggaggctgaggcaggagaattgcttgaaacctgggaggtggaggttgcagtgaaccaagatcgtgccattgcactccagcctgggcaacaagagcaaaactacatctcacaaaaaataaaaaaataagtggcatagatgtgtataggactttgaatttttcttggggactgacattctaggggcagtggcgagtctaaacttactattgagtacaatgtccatgcctgcatgtacttttggggtgagaatcctcaggttctcaaggactccccaactccaagaaccactgtggtagaaacagatgactacaacctgagaactttcacagaagcaaattcttgcctccttgcctcccctctctcccctgcagggattggagtttggaatcctgccttcgatgtcaccccccacgacctcatcactggtggcatcatcacagaactgggggtctttgcccctgaggagctccggacagccctaaccaccaccatctcttccagggatggaaccctagatggaccccagatgtaaccaactcagctctccctagcctgcctctctaggtttttcaatacatttcttgaatggctacccaaaagctgaccgtccagcccctgaccacacttgttcctagtgcagggagctcagacagggccttccatctagagcccagcacctagagccaggctgcccagattcaaatcctgactccgccacttttcccactgtatgatcttgggcaagtcacttcacctctctgtgccttggtttcctcatttataaaatgtggataacaggccgggcgcagtggctcacacctgtaatcccagcactttgggaggccgaggcaggtggatcacaagatcaggagattgagaccatcctggctaacatggtgaaaccccatctctactaaaaatacaaaaaattagccgggtgtggtggtgggcacctgcagtcccagctacttgggaggctgaggcaggagaatggcgtgaaactgggaggcagagcttgcagtgagccgagatagcgccactgcactccagcctgggcaacagagcgagactccgtctcaaaaataaatataattaattaattatttaattaaaaaaataaaaaataaatgtggataatactagtacctccctcttaaggtcagggctggagctagggtgacatctccagggcagaattttaagaggacaccaaaaaagctcagcaaccaagataaaaaatattttaaagcaatattttgttttgggttttttttttttgagatcaagtatcactcgttacccaggctggaatgtagaggcgagatctcagctcactgaaacctgtgcctccccggttcaagcgattctcctgccacagcctcctgagtagctgggattacaggcatgcgccaccatgcccagctaatttttctatttttagtagagacatgatttcaccatgttggccaggctggtctcgaactcctgactcaaatgatccccctgcctcagcctcccaaagtgctgggactacaggcatgagccactgtgcctgaccttacagcagtattttttaaaaatcaaaattaatgcaaaaatccatgatgaggccaggcttggtggctcatgcctgtaattccagcactttgggaggatcccttgagcccaggtgtttgagaccagtttgggtaacataggaagagcttgtctctacaaacaaaaatttaaaaacaatgagctgggcatggaactcacacctctagccccagctactcaggctgaagtgggaggatggcttgagcccaggagttcaaggatgcagtgtgctttgattgcactactgcacttcaccctaagcaacagagtgagaccccatctctttaaaaaaaaaaaaaaatccatgatgaacaaaacaagtatttgtttgagacggggtctcgctctgtcgcccaggctggagtacagtggtgccatctcagctcactgcaacctccgccttctgggttcaagcgactctcctgcctcagcctcccgagtagctgggattacaggagcctggcactatgcctggctaatttttgtatttttattggagacaccatgttagtcgtggctggtctccaactcctgacctcgggtgatccgcgccccgcggcctccgaaagtgctgggattacaagcgtgagccaccgtgcccggcctaaataaaattttgaagaggctagaaccccgcacttgtgccttgagcttactgacctcaacaccctggttccactaaaactttatttacaaaattatgctgccggtctgcaggatgtagtttaacaatttgattattttggatattaaaatattttttaagtcttgaaaatattgtttactattaccaaagtttttgaaccttcttaaattctgtaccagaggtgagtgccacaccctaacctagtctgagtttttatgtgtaaagatcataaaacgttgtaagttttctaaaacacataagctctcaataaacgttagcttatcattgtcaccgttttgttcgtaatgtttgaaaactccaactgtgatccactacactacccttgtgggatgctgtctctttaactctgtgccacgttgtatcccgtgagttcttgcgtttttccgccccgctgtatcccatggttccctgtgccttccggctacgactgctcacagtcccgcctcttccgctgcgtgccggaccatggcgcaggggcagcgcaagtttcaggcgcacaaacccgcaaagagtaagacggcagcggcagcctctgaaaagaatcggggcccaagaaaaggcggtaaggagcggcccggggacttgggggcgaggtggacccccggcttcccggcctcacgtgagcacatctttccccaggtcgtgttatcgctcccaagaaggcgcgcgtcgtgcagcagcaaaagctcaagaaggtgtgcgggggcgagagatggagcccggagggcggcgagtagcgaggggtggaacccggaggacggcgaggggggatgggtggagcccggggatcagtgaggggagagggtggatcctggggacgagctaggagcgaggggatagagccaggggccgcgttaggagcgaaggatggagcccggggcgcagagaggggtaagaggtggaagctggcgagggataggggctgggggacgtgctagggacgagagatgaaatctggaggccggcgagggaaggagcacagggatcggcaaagggcaagggatgaggcctggaggactcccagctctgtgggcctcccttttcttccttgtgcaaggggtgcaggaacaccacttaccacttcaaaagggcctcgtagaagcaagacctgcggcccaaaaagggttccaataacgtcagcctcttgctgttactgttttctttaattgaactcaggaagacagcgaggtgacatgggaagggaattgaaagcccagctttgtaaacctagaacagcagagggctcaaagaagtgtgagggtgcgttggttatcgtcatttttttttgagtcagggtctcactgttgcccaggctggagtgcagtggccccattatagctcactgcagcctcagcctcctggacttaggcaatctttccgtctcagcctctcgagtaggtagaattgcaggtgctcgccaatacgcggctaattttattttttttgtatttttggtagagacaggtttcactatgctgctcgggctggtcttgaactcctggcctcaaggcatcctcccgcctctgcctcccaaaatgctgggattacaggcgtgagccaccctatggttgtttttaagtgcaacatttatatgtagatgggtaaggttgagcttgtaaagaagttggaaggagatttaaaactggttttggtgggagtcaaacctgggtttgaattgtactccacagtaaacagccctgtgatcttgagcaaattgtttcgtcaccccagagtgtcggttttctcagaactgggtacccactggcccgcttacctccgtggagtggggaatctcatggtcaccttgcactcagcatgtccaaaaccaaattcctgatcctcccttcccattctgccctcctccccctgtgatcacttccttccagatgccataggtcatccttgaatccctcctttctctcacatcccggtctcatcccatttgttttgttttgtttttttgagatggagtctcgctctgtcgcccaggctggagtgcagttgagtgatcttggcttaggtgcaacctctgcctcctgggttcaagcgattttcctccctcagcctcccgagtaactgggattacaggcctgcaccaccacaccgggctaatttttttttttttttttttttttttttgtaattttagtagagatggggtttcactatgttggccaggctggtctcgaactcctgacctcatgatctacccgcctcggcctcccaaagtgctgggattacaggcatgagccactgtgctcgcccctattttgcccttagaatcaatccagaatccacccgcctcccatcttcttggcccctacctggtcccacccacatcatttcccaccgggaccagtgcagccaccttctcccttgtctcctggatcccacctggtcctctcacagaagccagagggtgcccatgagcacctgagtcggttccctccctccttggctcagaatcctccatggcttccacctcacccaggaaaaaggtccagtcctcactcagccacaaggccctgtagaatctgccctcgtctccttccaccctctcctctgctaactccctctagccttactggcccctgacccctccttcccggagcccttcctgggctccttgtcccacctgagaacttttgcactggctgtttcctctgcctggattcctctcccaataatacacactgctcccttcttccaactctcttcaaagaggcctgccttgatggtgacctgtacccatccctcctcactcctgtttcctctttgccatagcagcgcttaccatcctttaacagtgtaacatattacgctactgatgcttatattgtcccggtacatgcactgaattccagctccatgacccctgcatccaggcacctggttagctgtcccgatgctggtgatcgtggtcattggaactgtttttgttttttgtttttgttttgagatagagtttcgttcttgttgcccaggctggagtgcagtggtgcggtctgggctcactgcaacctctgcctcctgggttcaagcaattctcctgcctcagcctctcgagtagctgggattacaggcgcccgccaccacacctggctactttttgtgtttttagtagagattgggtttcaccatgttggccagcctggtctagagctcctgacctcaggtgatatgcctgccttggcctcccaaggtgctgggattacagccactgcacccagccggaacttttttttttttctttgagacggtctcacgctgtcccccaggctgcagtgtagtggaacgatcatagctcactgcagcctggacctcctgggctcgaccacccaaacagctgagacgagaggcacgcaccagcacaccgtgctaattctttcttttagtacagatgcagtctcgctgtgttgcccaggctggtctcgagttcctgggctcaagtgatcttcctgcctcagcctcgcaaagtgctgggatcacaggcttgagccaccacacccagtccgtcggaactcagaatggcagggcagaggcagtctgggaaaggcgactgagccaccagtttggggttcacactgctggttttgccccacgcttgtgccttacttgccagctcccttgcccactcttcagatcctcagcttgccgtctgcaaagcagagatgacctggggcagaggaggctgcccttctagaggctgggaccagaggctgtgggcacgccggatcccatgcagtttagggacctgggcaaccagtgcctcctggctgcagcagactgtttccccatccataaaatgggcatgagcagaggtttagaagccaaggtgcagaagtgaggatttttgtgtgtgtggaggccccggagagtgcaggacttaaaccccagccaccagacccacagtcaggtgcggttcgaggggatagttgctgatctagccccctgcgagctctagccaggaagagggtgactggtcaggccctctctcagccccaggtcacaatctgactgccccgtgcttctccctcagaacctagaagtcggaatccggaagaagatcgaacatgacgtggtgatgaaagccagcagcagcctgcccaagaagctggcactgctgaaggccccagccaagaagaaaggggcagctgccgccacctcctccaagacaccttcctgaggacgctggccccagtgcaggccaacatcccaccccctacctccatatgggaccttgcaagtcatcccacaggctgcactgtcaggaagaggaccctgtcccccagcactgggcttcacctagaacttcagtgggggccaagggtgctgagaacccagcaatgaccaggaagatacagtcactaacttcatctgtccccgtgccccttcccaggtcctgcctccacaggtttaacccagaacaataaacctggctttgtcatccctcttgcagtcctgtgttcgggtgagcaggccaggtgagcccacaagtctccatgagtgacgtggcctggcgtgctccaccccaccccaccgcctttagcaaccatgtgcccaggggacagctgggcttctacacctctggccctgagcctgagagccgggaaagagtcttttctccatttaaccccgggtgactcactccctggccagtcctcacccctggggacacaaccagagtcaagctggacatcagtaggtcagatgccacctcacaggaccaaggtgccgattaaaccggaatacattcagaaaccacgtggtactacctggttaaagagtgccaactgtaaggtagtcaggacagccagtggtagcactacctatgagccaggccgcactgtcgcccaggctggagtgcagtggcacaatcatagctcacttcagcctccatcttccaggctcaagcaatcctcccacctcagcctcccaagtagttggaactacaggcatgcactgccatgcccagctgatttattgctttttgtagatgtggggtcttgctaagttgcccaggctggtctcaacttcatggcctccagcagtcgtcctgccttggcctcccagagtgctaggattacaggtgtgatccaccatgccccacaagttctaatgcgttatacatgtcatctagcaggatgccctgttcaggtcctgcataatgttccagagtggaattgatcccgtagttggcagagtcctgatccgtgctctcagctgaccctctggctacctgtcactgtcaagaccagaattcacttctgcccatcctggagttcctccacctccaaattgtttgagtctgttgtgccacacagtacctatggaatattctgggatctctggcctgataaccttccttttctcccttcactggatccaggtcaaggtcacagcacagggaaaagttgggctgtagtctgggtgatactgaactgctgtctttggggagtggtacctgtgcatacagtcagcttctaccctgagacggggtggggtgactggttccctagtggcttatccactcctggccacctcacctaccaaggagacagaggtgctgggtcaccagcagctacccccaaaccccatctcaagtgtgttttctgggttccacacagtgacagtcaagattttgccttttttttttttttttcagacagagtcttgctctggagtgcagtggcatgatcgtggctcactgttacctctgtgtcccaggctcaagcgatcctgacacctcagcctcccaagtagctgggattataggcatgtgccaccacacccagataatttttgtatttttagtagacacggggtttcaccatgttgaccaggctggtctcaaactcctgacctcaagtgatccacccacctcagcctcccaaaatgctgggattacaggctataaagaggggaaaaacagttcagtggttcttcagtaagttcattgtggagctaccgtatgacccagcaattccgctcctaggtatattcccagaagaatggaagacatgttcacttgtagatttgcatatccatgtaaatagcagcactgctcacaatagcgaaaaggtggacacaggccaggcgcagtggctcatgcctgtaatcccagcactttgagaggctgaggcaggccgatcacgaggtcgagttcaagacctgcctgaccaacagggtgaaaccccgtctctattaaaaacacaaaaattaggccaggtgtggtggcttacacctgtcatcccagcactttgggaggccgaagcgggtggatcatgaggtcaggagattgagaccatcctggctaacatggtgaaaccctgtctctactaaaaatacaaaaaattagccaggtgtggtggctggcgcctgtactcccagctacctgggaggctgaggcaggagaatggcgtgaacctgggaggcggagcttgcagtgagccgagatcgcggcactgcactccagcctgggcaacacagcaagactccgtctcaaaaaaaaacaaaaattagccgggcgtggtggtacacgcctgtaatatcagctactcaggaggctgacacaggagaatcgcttgaacccgggagaccgaggttgcagtgagcggaaatcgtgccattgcactcgagcctgggcgacagagtgagactccgtctcaaaaaaaaaaagaaaaaatggacacagcccacacatccatctacggatgaagggataaactgaggtctatccttcaatagaatattcacccttggggaggaaggccaagtgcagtggctcatgcctgtcatcccaactacttaggaggctgaggcaggaggatcacttgagcctgggagttgaaggcagcagtgagctatgatctcaccactgcactccagcctgggtgacaaagccagatcccgactcttaaaaaggaatgaagcactgatccaggaaactacaagaatgagcctgaaaataaactaagtgaacaaagcgagacacaaaaggctacatcttgaatcgtcccacttacatgaaatgtcccaaacaggcaaatccatggggggagaaagcagatgagtgattgccaggggctgagggagcgggaatggggtttcttttcaaggggtatgaaaatgtcctggagtcagaagtgattgtacaacattgtgattatactgaactgtgcactttaaaatggtgcattaggccgggcgtggtggctcataactgtaatcccagaactttggggggccaaggccggtggatcacttgaggccaggagttcgagaccagcatggccaatatggcaaaaccccaactctactaaaaatacaaaaattagccgggtatggtggtgagtgcctgtaatcccagccacttgggaggctgaggcaggagaatcacttgaacctgggaggcggaggttgcagtgagccaagatggtgccattgcatgtcagcctgggtgacagagtgagacatggtctcaaaaaataattaaaataaaatggtgaattttagcaccaccacccctccccgcccaaacatgcagagagaaatttcattaaaaagtcctaacttagcatcttgaaaaatcaggaatcagggcagtggaagccgcacgcatgagatggaaagactgagtagtctggcgtttcccaagctgccaggaaggccccgccctcattgtttctggagggggagggaggggctggaggatgaatgaggcccagatctcagactgagggataagggtagctctttcctttctgggcttccctttcacagccaatccccggcctctgttcagggctggggattggctgttccagcttccagggcacacatccttgagccccatctagggaacctggtttctctggctgtctgcccacctcaggcagtaattgacttctgcccttggttttgttttatttttttttttattttttatttttttgagatggagtctccctctgtcacccaggctggagtgcagtggcgtgatctcggctcactacaacctccgcctcccgggttcaagtgattatcctgcctcagcatcccgagtaactgggactataggcacacaccaccacactcgggtaatttttttttagtagagatggggtttcaccatgttggccaggctggtctcgaactcctgacctctggtgatctgcccacctcggcctcccaaagtgctgggattacagatgtgagacactgggcatgagctgtttttttttttgttttgttttttgtttttttgttttgggagatggggtctcactatgttgtccaggctggtctcaaacacttctacctcaagcgatcttcctgccttggcctcccaaagtgctgggattacaggcatgagccacccagctgacttaaggcctttcaggtagggccacttggctcattcagtatttttttttttcagagcaggaatgaaagtttattaaaaagccttaaaacaataaggaaaggaaagaaggaaagtataacttagaagagggccagacgggtaacttgagaaaccaagttctccttgttcagtacttattgtgattacttttatatttttttagagacagcgtcttgctgtgtcgcgactgcagtggtgagatcataagtcactgcaaactcaaactcctacactcaagtgatcctcccacctcagcctccctagtagttggaaccacaggcatgcaccaccacgcccagctaatttttttattttccgtagagacagggtctccctatgttgccccgactgattttggcctcaagccatcgtcccacttcagcctcccaaactgctgggattgtagacatgagccaccacacccagctattgtgactacttcatgccaacctctcttctaggcagaactaagaactaacattcaggctggccgtgatggttcacgcctctaatcccagcactttgggtggctgaggcaggtggatcacttgaggtcaggacttcaagaccagcctggccaacatggtgaaaccctgtctctactaaaaatacaaaaattggccggcatcgtggcacacacctataatcccagctactcaggaggctgaggcaggagaatcgcttgaacccaggaggcagaggttgcagtgagctgagatcatgctactgcactccacctgggcggcagagcaagactctgtctcaaaaacacaaaacaaaacaaacctgacattccagtgacaacagaaaaaagagacaacaccaagtttgtatccccttcccatccaggccacagtcctccctgcctttgtgcccacagttccttcccccgagacatcacctcagagaagccttctttgtcccctgcccccagaagtggcctgtttgattgtcttcttagccagggtcactttctgttactttcctctgtttctactttgcttctcaaggaccccgactctgttcggggctgtgtctcaagcaactagaacagctcacaataggcactcgatgagcaggtgtttattgaaggaacggttccttctaaaaccttttgtttcagtgaatgagttatgattattcaatggttcattcagccccttagctataaacaatacacccttcctaaacaatacaccctctccggagtacctgattcatatcattgtctttgaactattttacaactctgtaagttgtgaaaattgatagcaatacaaaatagttcttatctacagacatgcaaatgtcatatcctgtccagcctagaggttcagttgacaacgcttattcccctgtggaaaaccgaatttgcctacattcacacctttgcttcaacagcttgatttctaaagtgtctttttcaaggtcaggcaccctggctcacacctgcagtcccagcactttgtgtgtgtctgtgtgtggtttttgttaatgatgatgatgttttttagatcgtctccctctgtcacccaggctggagtgcaatggcatgatctcagctcagggcaacctccgcctcctgggttcaagagattttcctgccccagcctcccgagtagctaggactacaggcgcgcgccaccacacccgcctaatttttgtatttttagtagagatggggattcaccatgttgcccagactggtctcgaactcctgacctcaagtgatccgcctaccttggcttcccaaagtgtgggattacaggtgtgagccactgcgcccagcctaatcccagcactttgggaggcggaggtgggcagattgctcgaggccaggagttcaagaccagcctgggcaacatagcaagaccctatctctgcaaaacatttttaaaaattagctgggtgtggtggggcatgcctggagtcccagctactccagagactgaactgggagggtcacttgagcacgggaggttggggctgcaatgagcccaaatcgcaccactgcactccagcttgggcgatgcagcaaggccccatctcaaaaacaaaagtgtctttttcagactctcttgaacataacatctgcctgtttcccacatcagtgaaattaagagaaaaacaaggctaggtgtggtggctcacatctgtaatcccagcactttgggaggccaaggcaggcagatcacctgaggttaggagttcgagaccaacctggccaacatggtgaaaccccgtctctactaaaaataaatagattagccgggcgtggtggcaggcacctatagtcccagctactcatgaggctgaggcagaagaatcgcttgaacccgggaaacgaaagttgcagtaagccaagatcgtgccattgcactccagcctgggcaacagagcaagctctgtctcaaaaaaaaaaagaaagaaaaaaagaagagacaaaaaaacacaaaaaagaaacaaaaaaaatttctgacctggcgaacaggaagaaaaaaacattttagcacccattcatctttatatgttaagggagtggtgattttgccaccttcaaaaaattagcttccggtctttctatctggaatcagaaaggcaagggccaggacggggtgggctctgggccaggacggggtgggctctgggtgccatctggcaccggagttggacaccaggaggcgcctctaaccggggttaaatccacccgcaggctggtggcgtctcgaccagcccaggaatcctgcattctggctccctttgtgcctctgacgccagccccttcgaggagcaccccaggggcaaggaagggctttcaggcactgcaggtatggggtctggaatgtgcactcacccattcccccttcacctctcccctcagggctccccaaacagcctcattttccccttcactttcctgggtgactttcccctcctgcactcccccaagccctgattagtgctggagccaggagccccagactccggaagaacccacaccttgagttctttgccaggttctgccactttttgactgtgtgaccgtcaagtcccttcacctttctgagtctcagcctggggccgtggctcatgcctgtaatctcagcactttgggaggctgaggccagcagatcacttgaggtcaggagttcaacaccagcctggccaacatgaagaaacctcgtctctaccaaaagtacaaaaattagccgggtgtggtggtgcgcgcctgtaatcccagctactcgggaggctgaggcaggagaatcgcttgaacccgggaggcggaggttgtagtgagccgagatcacgtcactgcaccccaccccagcctgggcgactgagtgagactctgtctcaaaaaacaaaacaaaacaaaacaaaacaaaacgggaggctgagacaggagaatcacttgaacctgggaggtgaaggttgtagtgagctgagatcatgtcactgcaccccaccccagcctgggcaactgagactctgtctcaaaaaaaaaaaaaattaaaacctttctgagcctcagtttctctgtctgttacattgggatccccactccccctcagtgtgagttcaggagcctaagaataagggacataccaatttttttttttttttttttttttgagatggagtctcgctctgtcgcccagactggagtgcagtggtgcgatctcgactcactgcaagctccgcctcccggttcacaccattctcctgcctcagcctccggagtggctgggactgcaggcacccgccaccatgcccggctaattttttgtgttttttagtagagacggggtttcaccgtgttagccaggacggtctcaactcctgacctcatgatccgcccgcctcggcctcccaaagtgctgggattacgggcgtgagccaccgcgcctggcgggacataccaatgtgactaggagctgcgcttgtgtgctgggggcagagcagtgggaacccaagtcctgccatcccccgtcctctctgtccctccctagctcccctctcccagggacagaggcgtcattaaatgtggcttttcctgacagttattggccgggcgctgtggctcacgcctataatcccagcactttgggaggccgaggcaggtggatcacctgaggtcaggaattcaagaccagcctggccaatatggcgaaaccccatctctactaaaaatacaaaaattagccaggcgtggtggcgggcgcctgtagtcccagctactcggggggctgaggcaggagaatcgcttgaacctgggaggcaaaggttgtagtgagccgagatcacgtcactgcaccccaccccagcctgggcgactgagtgagactctgtctcaaaaaaaaaaaaaaattaaagcctttctgagcctcagtttctctgtctgttacattgggatccccactccctctcagtgtgaattcaggagcctaaggataagggacataccaatttctttctttttttttttttttgagacggagtcttgctctgtcacccaggctggagtgcagtggcgcgatctcgactcactgcaagctccgcctcccgggttcacaccattcttctgcctcagcctcccgagtagctgggaccacaggcgcccgccaccatgcccagctaattttgtcttttttagtagagacggggtttcaccatgttagccaggatggtctcgatctcctgacctcgtgatccgcccgccttggctggcggcggggattacagtgctggcggcggggattacagtgctgggattacaggcgtgtaatcccattacagggaggctgaggcaggagaatccagcttgaacccaggaggttcaagctgcttgaactcctgcttgaacccaggaggcagaggttgcagtgagtcaagatccgccactgcactccagcctgggcaacagagcaagcgagactccgtctcaaaaaaaaaatactttgggaggctgaggcgagcggatcacctgaggttaggagtttgagacctgcctgaccaacatggagaaaccctgcctctactaaaaatacaaaataagcctggcgtggtggcacatgcctgtaatcccagccactcaggaggctgaggcaggagaatcacttgaacccaggaggtggaggtttcggtgagccaacatcgcgccattgcactccagcctggcctgggcaacaagagcgaaactccgtctcaaaaaaaaacaacaacaaaaaaaaaaaacaaaaaaacacagttattcttgcctaagcctttctctcctgcctccaccttcccccgcctcgacctggcacgaccacttctcctggcagggccctgacactttgcccatgaacttctgtttcaaaaagaaagaaaagaaatgcaagaaggaaatcttgccagctgcgcatgccggaggggctgcgtcgtcgcgaccaggaagcaagcgaagcctacccagctggtttcctgcctgagtcaacggtggctgggggtgctgcagggggctggcagaagggagggaccctcagaaagctagggtggagatatccacgagctgggggtccttgtctccaccttcatctgagcccccagggtagccccatcttccacgggttgagagcacacgtggtttggggtcaggagctgtacatgcctagacagtgagctcacgctgggcgcgggcaggatcaatctggcttccatttccccaaagcccaagcttgctggctttactgagaaggaaggacgcaggtggttggaactacccccatcaaactcctttttttcctcttttttttttttttttttttttttgagacaagagtcttgctatattgtccaggctggtcttgaactccgaggcataagcgatcctacctcctctgcctttcaagtagatgggactggctgggcacagcccctcacacctgtaatcccagcactttgggaagccaaggtggaaggatcgatcgcttgagcccaggagctcaagatcagcctggccaacatagtgagaccccatctcttttaaaaaaattgttttaaaaaattagccaggcatagtgctacacgcctgcagtctcagctactcacgaggctgaggcaggtggaccacttgagcccgggaggttgaagctgcagcaagtcgtgatcacgccattgcacttcaacccacgcaacagagcaagaccctgtctcaaaacagggttagctgtttgaaggcagggcgtagtggctcccacctgtaatcccagcactttgggaggcggaggagcgtggatgacctgatgtcaggagttcgagaccagcctggccaacatggtgaaaccccatctctactaaaaatacaaaaattagccgggtttgccctgtgatcccagctactcaggaggctgaggcaggagaatagcttgaacccgggaggcggaggctgtagtgagctgagatcgctccactgcactccagcctgagcaacagagcaagactctctctctgtctgtctctctctctatatatatatgttagtatctattgttagagaattaaataagacattctcaccctctgataccccattctgtgttcctcctaaagtctacccactggcctagagtgacttctctgattcagcattacaggacgtacattggagccctttcaaagctagacttagccgacatagccacgtatcagatgctgaagagggctgctgggaaaagccagccctgaggtcctgtttgcaaggggagcaccagaaagacatgcttttcatttttgttctgtcttggtttgttttttcttgagacgaggtctggctctgtcgcccagactggagtgcagtggcgcaatcatggctcactgcagcctcaaccttctaggctcaagcaatcctcccaccacagcttcctgagtagctgggactacagatgcgcaccaccacacccggttaattaaaaaaaaaaaaaatttaggccaggcacagtggctcacacctgtaatcccagcactttgggaggccgaggcaggcagataacctgaggtcaggagtttgagaccagcctggccaacatggtgaaaccccgtctctagtaaaaatacaaaaattttctgggtatagtggcgctcgtctatagtcccagttactcgggaggctgaaacaggagaattgcttgaccctaggatgtggagcttgcagtgacctgagactcgccaccgcactccagcctgggcaacagagcaagactccatttcaaaataaataaataaactaataaataaataggccaggtgcagtggctcacgcctgtaatcccagcactttgggaggccgaggtgggtggatcacaacgtcaggagttcgagaccagcctggctaacacggtgaaacaccgtctctattaaaaatacaaaaaaattagcccggtgtggtggcacatgcctgtaaacccagctactcgggaggctgaggcaggagaatcacttaaacccgggaggcagaggttacagtgagccaagatcgcaccactgcactccagcctgggctacacagcaagactccatctcaaaaattaaaaaataaataaataaataaacatcaaataaatttttagaaatgggggaggggggtctcgctatattgcccagcctggtcttgaactcctggactcaagcaatcctcccacttcagcttccccaagtgctgggattacaggtgtgagccactgcacccggccatcctttgcttgaactcctccctgtgtctcctctgaccccagttactcactccccataagtctaaatcctatgcaaggagataccccagtaagtctagggctccaaagcagcccccagttgacttccactagtccagctcctactgctgggtgacctcaagcaagtggctcagcctctccaagcctcagtttcctcctctaagaaatggaagtgacagtccccactttgcaacactgtttgacggcttatacttcagcgtttatctccatagctacgggcattgcatgagcactcaacacattattattattgctatttctgttgctatcactgtggcaggctgtggtttctcaagacgggcactgtctaacagaaatacaactcaagccggatgtggtggctcacgcctgtaatcccagcaatctgggaggccgaggcggaaggattgcttgaactcaggaattcaagaccatgggcaacacaacaagacttcctctctatcaaaattcaaaaaaattggccaggcatgctggctcacacctgtaatcctcacactttgggaagcagaagcaggcaaatcacctgaggtcgggagttccagaccagcctgaccaacatggagaaaccccgtctctactaaaaatacaaaaattagaagggcatggtggcgggtgcctgtaatcccagctacttgggaggcgaggcaggagaatcgcttgaacccgggaggtggaggctgcggtgagccgagatcacgccattgcactccagcctgggcaacaaaagcgaaactccgtctcaaaaaaaaaaaaaaattaaccagggatggtggctcacgcctgtaatcccaggactttgggaggccaaggcaggtggatcacttgaagtcaggagttcgagaccagcctggccaacatggtaaaaccccatctctattaaaaatgcaaaaattggccgggtgtggtgacgcacacctatagtcccagctacttgggaggctgaggcaggagacttgcttgaacccaaggttcaagtgaggttgcagtgagccgagatcgcgccactgcactccagcctggtgacagagcgagactccggctcaaaaaaaaaaaaaacaaaaaacaaaaaaggaaaaaaagaaagaaatacaacttgagacacatatatacttttatttatttatttatttacttatttatttttgagatagcatctcactgtgttgcctagcccagtcacaaactcctggactcaagtgctgctctccgctcagcctcccaaagtgctgtgtttacagggaccaaccactgtgccctgccacatatgttattttattttattttactttatttatttattttatatatatatatatatattttttttgagatggagtctcactctttcacccaggctggagtgcagtggtgcgatgttggctcactgcaacctctgcctcccaggttcaagcgattctcctccctcagcctcccacgtagctgggattacaggcacgcaccaccatgcctggctaattttttgtatttttagtagagacaggtttcaccatgttggccaagctggtctttttttttttttttctttttttgagacggagtctcgttctgtcgcccaggctggagtgcaacactgtgatctcagcttacttcaacctccacctcccgggttcacgccattctcctgcctcagcctcccaagtagctgggattacaggcacccgccaccaggcccagctaattttttgtatttttagtagagacggggtttcactatgttggccaggctggtctcaaactcctgaccttgcgatccgccctcctcggcctcccaaagtgctgggattacaggagtgagccaccgcgccccgcctaagctggtcttaaactcctgacctcagatgatctgcccgcctcggccttccaaagtgctgggattacagccctgagccactgtacccagcctacatacgtaatttaaatgtcctgaaaccatgtaaaagaaaatatatgaaatcaattttaataatgtattttattaaaccaagtttatctaaaatataatttcaacatgttaacaacactaaacatttgctttcttttgttctgtctttttttttttttttttgagacagagtctcactttgttgcccaggctggagtgccgtggtgcaatcttggctcactgcaaactccgcctcctgggttcaagtgattctcctgcctcagcctcgcaagcagctgggattacaggcgcccgccaccacgcccagctgatttttgttttgttttgttttgttttgttttttgaggcggagtcttgctctattgcccaggctggagtgcagtggcgcgatctcagctcactgcaagctccacctcccgggttcacgccattctcctgcctcagcctccggagtagctgggactacaggtgcccgcccccacgccaggctaatttttttgtatttttaataaagacggggtttcaccgtgttaaccaggatggtctgcatctcctgacctcatgatccgcccgcctcggcctcccgaagtgctgggattacaggcgtgagccactgtgcccggccctaatttttgtatttttagtagagacggggtttcaccatgttggccaggctggtcttgaactccagacctcaggtgatccgcctgtctcagtcttcgaaagtgctgggattacaggtgtgagacaccttgcccggcctcgttttctgtttttttgtttgtttgtttgttttcctgagacggtcacactgtcactccggctggagcacagtgatacaatcatatctcactgtagcctgaacctcttgggctcgagagatcctcctgtcacagcctccagagtagctgggactactggcttgtgccaccacgcccagctgattttcttattttttaatagagatgggttttcgccatgttgcccatgctggtctcaaactcctgggctcaagtgatcttcccacctcaccatcccaaagtgctgggattccaggcgtgaaccaccgcgcctggccaaaacattcttttttttttttttttggagtctcactctgtcccccaggctggagtgcagtggcgcaatcttggctcactgcaacctctgcctcctgggttcccaccattctcctgccctagcctccctagtagctgggactataggcgcctgccaccatgcccggctaattttttgtatttttagtagagaaggggtttcactgtgttagccaggatggaaaacattcttaatgaaatattttaggccgggcgtggtggctcacgcctggaatcccagcactttgggaggccaaggcaggcagatcataaggtcaggagtttgagaccagcctgccaatatggtgaaaccccgtctctactaaaaatgcaaaagttagtcaggcgtggcggtgggtgcctgtagccccagctacttgggaggctgaggcagaataatcacgtgaacctgggaggcagaggttgcagtgagctgagatcactccatctcaaaaaaaaaaaaagaaatatttttccttgttcccttcctgctatgtctccaaaatccactctgtattttacctttccagcacaacctaatttcagccagtcccatttcaagggctcagagaccacttgtggccattggtgaccatactggacagtgcaggtctgcaggggagtttaactaattgagggggtggcagggagagtgggtgaagactggccagagggtgcagctgtgagactcgaagtttctccaagaaaaagctagggcttccatatggatgagtggataatcactgttttttttttttttctgctgtgcctatcatttaactgaatggaggcaaagcatgtgttggttggtacattcaacaagttctaggttaagcgcctaccttccaggtgctgccggtacagtaaagcacagatgggacaaactcctgcctcctgaggctcacagtggagagggagagattgaaattaagcaactaccaaaggtggatcacttgaggtcaggagttcaagaccagcctggccaacatggcaaaactccgtctctaccaaaaatacaaaaattagccgggcgtggtggtgggcgcctataatttcagctattcgggaggctgaggcaggagaatcacttgaccccgggaggcgcaggttgcagtgagccgagatcgcaccactgcaccccagcctggacgacaagagtgaaactccgtaaaaaaaaaaaaaaaaaaaaaaaaaaaaaccgccgaaacagataaataaatggtaatggtgagaagtatgaggaaggaaaaatgcagggtcctctgaggacattggcaaggagccgggacgggaacgggtgatggaagccatggccagcttccaggccagagacggtggcctacacaagctgagtcagaaaaaatgctcagaggtgctggggtttgattaagtgttagggtgaacctcatggaattgccattttaacaggccaaaaatggtaaaaaaaaattagcaatttcatatgacccaagatagtatctagggcatggaaaggaggggcggggtactatactagttttgaggctcaagggatgacctatgaaccccctaaccgagctttgtttctggagagggggtccgcggcccgcatgagctccctcagtgagcctgcgacccctccgcccccacaagaaccaaaacttgacccggtgcccagagaggttgagtgagtttctcgggtcgcacagctgggagggacgaggggctgagccactgccaagggatcccgctgctctgtctcgctcaccggccgggctatgttgattgtcccctcgcggcgcccggaagcgaccctcagtaaacaaagccgtgtgtgggcgcagccccagaagcctggggcgcgcagtccagcccaagagaggcgggggaggaatgttgtgaatgaaccccgggcccgccccgaaactccgcataaggcctgggccgcgggggtcctcccactctgattggcctctggcgccccgtgattgacagcgcccctcgctgtgcgctctggttgggtaaacaagaaaagactggcatcgcagtcatcgagtgagcagcgaggcttggacacgggtctggcggcgcagccaatggcgggggagggccgaggaggccgagggggggccaatagggacaggcggtgggggcgggacgacggcggagctaaagcggcggctgaagcagcttcattgttgtgaagagtcttaaaggggccgcatcaccctgccggcccggcgcgggtcgggggtgggtgcggtaggggtcccggggcggccgagcgcagaggacggacgggaaggagggcagggggcgcgggagccggcgaagcggagcgggcatcggaccgagccccccaaagaggccccgccccggccctggccccggccgggccggatggaaccccccgcggccaagcggagccggggctgccccgcgggacccgaggagcgcgatgccggggccggggccgcgcgtggccggggccggcccgaggcgctgctggacctcagcgccaagcgggtagccgagagctgggccttcgagcaggtgaccgcgggggaagggggcgggggcagggacgcacccccagcaccttccccacctgtcttctcctcccccacaatccccagactccagagctaacccaatcagagacaccccctgagattccacccccaggacccttaaccctgcctggaaacaccccctcatcctcctgtttctgtccttcaaacccagtaacccacccccatcccttctctgccatctctgcccctcagcgccccagatcccaaatcaggacacttccttcttctcctaccaaccccagatctctgagatctggcccccatggcccgcctacaaccctgggcacccctcttttcccgccttatcccccaacggtacccctcttttcccaccttatcccccaacggtacccctcttttcccaccttatcccccaacggtacccctcttttcctaccgcatctttattcgccaatcagggcaccccattcagtcttcaatcctctcttcggccccccgcttggggacaccctgtctccctccatcgtagcctctagagactcacactaccccattcctgctctccagatccctaccgtacaccccaagtaaataactcccccatctctccagattccagctcaagacaccccttttttccccattcattcctgccctcgagcctccagattccacctgttccttggggacccctctctactcctccagattcctctttcggggctgcccgtcttctcctggcttgccgcagggattactgaaatgccagggtccctcctcctccccacctcatccccctgacctatcctatctcttcccataggaaaacagcaggggcggagcctgggtggtggtccctggacaggtgcacctagaagctctcttctgtggcttctggtggcactgacaggatgtcccagagctggggccctttaagtcccctttttcagcttcagtgtgggcccccaaggaactggagacatggcccagacttgaacaggaagcacacacgggctctatcctctgtccagcttcagggggcgttctttcctgcccggcctctctggagttaggaagtcggcctggacggatgggtttgggccaagtgtggatgggcaggctctgattcatggactggaaaatccctccttagtcatttgccaactgtccctgaggcctgggctggtcattgcctctcccacttcccctagaaacccaggtggagtaggggctaaggagggccccttcattgcatgtgagacacacagaacaatctgaaaaccatctccgagcctcccacaaacctgccctggccaagccgagccctcagagttcttgacccacagaagctcatggaatcccctgcaaccctttggcagttgttcttgttcccactttgaggaaactggggcacagagaagttgagaaacttgcccaaggtcacccagccagggaatagcaagtccagattggaaggcaggctcagccagctcactgtattgcccagagcccacagcggtggccaggacaccccctcccctcctggggccccttcccagggatggggcatggaagggaaactgaggaacgacagagtctgtcttaggagttgaaacaactcacagctctgggaccctgaacaagtgaattcatcccactaagtctcagattctcccagctataaaacaggttcatgatttagtatcaatgtgccatcaagggtgttcaatcttttagcttccctaggccacactggaagaagaactgtcttgggccacatataaaatgcactaacactaacaatagctgatgagcttaaaaagaaaagaaaagaaaatctttgtatttatttatttatttatttatctgaaacgagtctcagtctgttgccaaggctggagtgcagtggcacgatctcggctcactgtagcctccacctcctgggttcaagcaattctcccgcctcagcctcctgagtagctgggactacaggtgtgagccgccatacccagctaatttttgtatatttagtagagatggggtttcaccatgttggccaggctggtttcaaactcctgacctcaagtgatcctcccaccttggcctccctcccaaagtgttggaattacaggcatgagccaccgcacccggacgtatcttataatgttttaagaaagcttacgaatttgtgttggcctgcattcaaagctctcctgggccagggccgtggggcgtgggttggacaagctcacactaggtggctgtgagaatttggaaattacatacataaagtgttcagcatagtgtgtgcattcttttcttttcttttcttttttcttttcttttgaggcagagccttgctcagtagcccagtgaaacaatgattgcgcaatgacacaatcataactcactgcagcctcaaactcctgggctcaagcaatcctcctgcctcagcctcttgagtagctgggattccagacgcccaccaccacacctggctaatttttaattctgtgtgtgtgtgtgtagacatggggtctcactatgttgctcacgctggtctggaacgcctgagctcaggcaatgctgccgcctcagcctcccaaagtgctgagattacaggtgtccagccaagatgggcaccttaatcattattatcacttttttctaacttcttcctgctccaccaaagcctggtgggtgggaagatctcacaacagaatcccaagaccctgcagctaggaggatccaggagggaaaccgcaagaaagttctagaatgctaactatgggccaggtgttattgtaagttctttaagctctttacatccatactgcatatttagtctccacaatcctcaagaggttggtgccgtggacctccccactttacacctgagaatactgaggccaagtgacttgcctggggtcacagtgctcctaaatagtaaagctaggattcaagcctcggtttctctgtttttttatttttatttatttatttgagacggagtctcgctccgtggcccagactggagtgcaatggcgcaatctcggctcactgcaacctccgcctcccgggttcaagtggttctcgcgcctcagcctcccaagtagctgagattataggtgcatgccaccacacctggctaatttttgtatttttagtagagacggggtttcgccatgttggccaggctgctctcgaactcctggactcaagtgcaccaactgccttggcctcccaaaatgctagaattgcaggcatgagccactgccctgacctattttttttgagatgggatcttgctctgttgcccaggctggagtgccgctggtgcaatcatggctcactgcagcctcaaactcatggcctcaagtgaccctcctgccccaccctcccaggtagctgggattccagatgcatgccaccatgcctggctaattttttttatttttttatttttttatcttttttttttttttttcgagatgcagtcttgctctgtcacccaggctggagtgcagtggcatgatctcagctcactgcagcctctgccttccaggttccagcgattttcctgcctcagcctcccgagcagctgggactacaggtgctcaccaccacacccggctaattttttttatctttagtagagatggggtttcatcatgttggccaggctggtcttgaactcctgacctcaggtgatctgcctgcctcggcctcccaaaaatcctgggattacaggcgtgagccatcgtgcccggccagtttttttgtaaagatgggagcctctctatgttgcccaggctggtctcgaactcttggcctcaagcgatcctccctcctaagcttcccaaagcgctgggattacatcaaccccaggctcctaacccactggcccttcctacaggtggaggagcggttctcccgggtgcctgagcccgtccagaagcgcatcgtgttttggtcgtttccacgcagtgaacgggaaatatgtatgtactcgtcgctgggttacccgcccccagagggcgagcacgatgcccgggtgccctttacccgcgggctgcacctgctccagagcggggccgtggaccgcgtgttgcaagtgggtgagtctttgtcccccactcctgctggggaggccaggaggtccataccaggcctggaaatgggggagttggagggaggcctggggccaggggatgggaggttacagacctcaggcttcgaggcccagataggattgtacaagattttttttttttttttttttgagacggagtctcgctctttggcccaggccggagtgcagtggcgcgatctcggctcactgcaagctccgcctcctgggttcacgccattctgcctcagcctcccgagtagctgggattacaggcgcccgccaccgcgcccagctaattttttgtatttctttttttttttttttttttttttttttttttttttttttgagacggagtctcgctttttcgcccaggccggagtgcagtggcgcgatctcggctcactgcaagctccgcctcccgggttcacgccattctcctgcctcagcctcccaagtagccgggactacaggcgcccgccaccaagcccggctaattttttgtatttttagtagagacggggtttcaccatgttagccaggatggtctcgatctcctgacctcgtgatccacccgcctcggcctcccaaagtgctgggattacaggcgtgagccaccgctcccggccccattttttgtattttgtatttttagtagagatggggttttactgtgttagccgggatggtctcgatctcctgacctcgtgatccccccacctcggcctcccaaagtgctgggattacaggcatgagccaccacacccagcctgtacacgatgttttgagcaaaagctcaaggatcaccctagaacccaggcagcagggtttagacaaggggttgggggagaggatggtgaaccagaaacaggggaggagagatcccagaacttacacatcagagcccatgtaaaggaggggtgaggccagatgtggtggttcacacctgtgatctcaacactttgggaggccaaggcaggaagatcacttgaggccaagagttcaagaccagcctgggcaacacaatgagaccttgtcttcacaaaaaaatcaaaaaatgagctgggcatggtggcgggtgcctgtggtcccaggtacatgggaggccaaggcaggaggatcgcttttgcccgagaggtcgagcctgcagtaagctatgattgcaccaccgtactccagcctgggttacagagcgagatgctatctcaaagagaaaaaagaaaaaaaaaaaggaagagaggtgagggccactctagggacaagggtagaggttgagacatggtggtgaaggtgccagacctcaggcttcaggtccagatggggttgggttcgggattatgagctgaaggtggaaagtgctcctagagccctagacctcaggctgctgagctggggaatggggaatgaagtagtgagacggagagaagagcaggtcccagctgaggatcagagaagcagctgtcagccagcagtgagaggaggctccagacctcgggctgagggacccagtgatgctttgggccaggggtttagagccagaggtaagaatgatcctagacctcaggcagtggggcccacgtgggagttggacacaaagatttagagccacaggtgagagtcttagacctcaggcagagaggctgggatttcaaaggcttagagctattgttgagcaatggtcttagacctaaggcaacagggctgaggtgggaatgtagagtagaagtttagaattcttttttttttttttttccgagatggagtcttgctctgttgcccaggctggagtgcagtggcacgatctcagctcactgcaacctccacctcccaggttcaaggaatacccctgcctcggcctccctagtagctgggactacaggcacccgctatcatgcctggctaatttttgtatttttgtagagacagggtttcaccatgttggccaggctggtcttgaactcctgacctcgtgatccacccgcctcagcctcccaaagtgctgggattacaggtgtgagccaccatgcccagcttagaattttttttttttttttttttgagatggagtctcactctgttgcccaggctggagtgcagtggcacaatctcggcttactgcaacctccacttcctgggttcacaccattctcctgcctcagcctcccaagtagctgggactacaggcacctgccaccacacccagctaattttttctattttttagtagagacggcgtttcaccgtgttagccaggatagtctcgatctcctgacctagtgatccgcccgcctcagcctcctacagtgctgggattacaggcatgagccaccacgcctggccaaatttttttttttaagagatagagtctcggccgggcacagtggctcacacctgtaatcccagcactttgggggctgaggcgggtggatcacctaaggtcaggagttcagcctggccaacatggtgaaaccccgtctctactaaagatacaaaaattagccaggtgtggtggcacatgcctgtaatcccagctacttgagaggctgaggcaggagaatcagttgaacccgggaggcagaggttgcagtgagccaagatcatgtcattgctctccagcctgggcaagagagagagactctgtctcaaaagaaaaaaaaaagggagatagggtctcactctgttgcccaggctggagtgcagtggcgcgataatagctcactgcagccacaaacatctgagctcaagtgatcctcccacctcagcctcccaagtagttggtaccacaggcgcaggccaccacacttgactagtttttaagttttttgtagagacctggtctcactctgttgcccaggctggtctcgaactcctgggctcaagagatcctcctgccacagcctcccaaagcactgggattacaggcgtgacccaccatgcctggccaagtatcaggttaagatcagctgtgaagggtgggctcagacctcaagctaagaaaacaaaagggctgcagagactgggagagatgtaatgagaatagtggaaaggccttggatctcaggcagccagactcagaaagggaccagtagaggctgagccagaaaacaaaagtgaggcctgggactccagacctctggctgcagcaggccatttctcccagctagaggtcggggctgggctgatatgatgccccgtcggctctatctgctttggagcccctttgctgggacatggccccgctgaccacgggctccttgccacctccagctggtatgaggaagccatctccctgcatgacccaggctgggcctgagctgccgaaccagtcagatgagcctggcacctgggctgcccagggaggggcagggggagtgaaggggacacctggcccctggcttacttcatcagcccctcgccccaagcgccacgggtctttggcattttctcaggaaattgaggggctcctgaagccctggccatattcattgtaacccaaggaatcagaaaaccaccttcaatgtcatggtatgatactattcataattaaaataagagcaagtgttgggctgggctcggtggctcgcgcctataatcccagcactttgggaggccgaggcgggtggatcactaggtcaggagttcaagactacactaggtcaggagttcaagactagcctggccaatatggtgaaacctgatctctactaaaaatacaaaagattagccgggcatggtggtgcacgcctgtaatcccagctacacaggaagctgaggtaggagaatcgcttgaacccaggaggcggaggttgcagtgagtcaagatagcgccactgcactccagcctgggtgacagagcaagactctgtctcagaaaaaaaaaaaaaaaaaagcaagtgtttacttaggacttaacttcataccaacagcgttctaagcctttttttgagacagagtctcattctgttacccaggctggagtgcaatggtgcgatctcagctcactgcaacctctgcctcccgggttcaagccattctcctgcctcagcctcctgagtagctgggattacaggcgcccgccaccatgcccggctaatttttttatatttttagtagagacagggtttcaccatgttggccatgctggtcttgaactccggacctcaggtgatctaccagcctcggcctcccaaagtgctgggattacaggcatgagccactgcgccgggctgtctcttctaaaaatacaaaaattaggctgggcaccgtggcccacgcctgtaatccctgcactttgggaggctgaggcaggcggatcacctgaggccaggagttcaaaatcagcctgaccaacatggagaaaccccatctctactaaaaatacaaaattagccgggcatggtggcgcatgcctgtaatcccagctactcgggaagctgaggcaggagaatcacttgaacctgggaggtggaggttgcggtgagccgagatcacaccattgcactcctgcctgggcaacagagcaaagctctgtcccaaataaataaataaataaataaataaaattagccgggcatggtggtgtgtgcctgtaatcccagttacttgggaggctgaagcaggagaatcgcttgaacctgggaggcggaggttgcagtgagcccaggtcgcagcactacactccagcctgggccacagagcgagattttgtttcaaaaaaaaaaaaaatgcaaagtgagtgaggtgacttgtgctagtgaagtgactcggctgggctttgcaaccgggtcttgctgtgtaccacaaacaccgcctgtctctgggatgacacggatgcgacagtttggctttgatcctaggattccacctgagcggaaacatccgcgagccagggagtcctggagagcccgagcgcctctaccatgtctccatcagctttgatcgctgcaagatcacgtccgtgagctgcggctgtgacaaccgcgacctcttctactgtgcccacgtggtggccctgtccctgtaccgcattcggcacgcccaccaggtggagctgcggctgcccatctccgagacgctctcccagatgaaccgggaccagctgcagaagttcgtgcagtacctcatcagcgcccatcacactgaggtgctgcccactgctcagcgcttggctgatgagatcctcctgctgggctccgagatcaacttggtgaatggtaagggcaccccgggggtccggtggggagaggatgcccaagcgcacagccacgccacttgctgtgtgcccagtgctggtcacttactgacagaaagttgtgggggcggggggcggaaaacgcgccatggcctgcatcatctgaggtcacccacctggtgagtggcagatcccagatatctggacacaggacagatgagtagttgcaaatcagcctacgggcagagggcgagggcaggaggggagatcctgcgttagagggcaagtgggaggtctggccccagggctgggtatgtcaatagatggagcatcctgggtatgggaggagaagagggggcgtgaagggaatgtgggacgtttgtgggtgtcagaggtgttatgggtgaggggatacaccaggaggcgtggtgagggctgggagggtttggggggctccgaggggcttgggttgcctagctaggatggggaaggtgagtagtaggtggaggcatggatggatgatggagggaggtgctgggtgggtacagaaagtgttcgtgattggctgggcgcaggggctcacacctgtaatcccagcactttgggaggccgaggtgggcggatcagttgaggtcaggagttcaagaccagcctggacaacatggcaaaaccccatctctaccaaaatataaaaattagccgggcgtggtggtgggtgcctgtagtcccagccactcaggaagctgaggtgggagaatgggttgaacccgggaggcagaggttgcagtgagctgacatcgcgccattgcactccagcctgggagacaaagtgagaccctgactccaaaaaaaaaaaaagcgttcatgatcagtcactgagggcaactgatggtgtggaaaaacgaatgggtgggtgggggatatttttttttttgagatggagtcttcctctgtcacccaagctggagtgcagtggtgcaatctcagctcactgcaacctctgcctcctgggttcaagcaattctcctgtctcagcctcctgagtagctgggattacagatgcacaccatcatgcccggctaatttttgtatttttgtagagacaggggtttccccatgttggccaggctggtcttgaacttctgacctcaggtgatccacctgcctcagcctcccaaagtcctgggattacaggtgtgagccaccacacccagcctggacgggatattaacaatgccgttaggtgaatgggaattggaagctgagtgtggtggctcatacctataatcccagcatttgggaggctgaggaaggaggatcactcgagaccagcagttcaagaccggcctgggcaaaatagggagacctcctctctacaaaaaataaacaaaagtagttgggcatgatggcacacacacgcctgtagatacttgggaagctgagatgggaggatcatgagcgtgggaggtaaaggctgcagtcagctatgatcgtgctactacactccaacctgatgacagactgagaccctgactcaaaaaacaaaaaaaaaaaaagaagggaaggacagaactggtggtgattggaggtgaggatgagtggttgggtggggagggctttgactagtggagttaaggtagactgacagtggtggacagatgaagttagtgaaagaatgaaagatccaatgggtacatgcattgggagtgagttgatgggtgaatggaaggaaggttcacatatgtggatcaacatcgtgggtgggcagagtgggtgggcgctttgtgtagggtggatggatggacgaatggggtagtgggtgttttgagaggtacatatgaatggatggtttgataatgaatgggtggtttaatggaagcatagagagttaggattagttattgggtgataactaatagttatcacctagataactagggttagttattggatgatagttactgggtggggtggatagtgtacttgtgtgggtcaatggacaaatgggcgggtgggtattttgagtggttagttcacgtggattggaaagataaaaggggtgagtgggcagatagatcaataagatgagtatatagatgggtggatgggtgggaattatgggtagggtggatgatggacccatgatggggtaggtggttgtttaaagggtatggacatgtggatgaagtgaaatgggggatatggccaggtagatagaggctggcatgacttgggtgggggtggataagtgggttgtgtttcaggtgagacagatgagtaaacagatgggtcggtggtgttttgagtgggatgggtaaatggatgagtggatgggtagatggatagatgtgtagtgtttcaggagagatagatgaatggattggatgggtaagtaaatggatgaatgaacaaatggatgaatgagctcctggtgttttgggcaagatggatggatggatggatggatggatggatggatggatggatggatgaatattactacaggggagatagatggattggatggatgactcagtggataaatgagcaaatggatgagctggtggcgttttggacaagatggatggatgcatggatggatggacagatggatgcatggatggatgcatggatggatggatggatggatggatggatggatggatgggtgtatgggtgtatgggtgtgttgtgtttcaggtaagatagatgaatggattggatgggtgatgtattactctgttctcacactgctataaagacatacctgaaacaggttaatttaaaggaaacaggtttaatcggctcatagttctgcaagctacacaggcttctgcatttggggaggcctcaggaaacttacaatcatggcggaaggtgaaggagaagcaaacacatcttcacatggctgtcaggagagagagagcgaagggggagacactacacactttcaaacaaccagatctcatgagaactctatcatgagacaacactaagggaatggtgctacaccattagaaaccatccccatgatccagtcacctccctccatgccccacttccaactctggggatcataattcaacatgagatttgggtggagacacagagccaaaccatatcagatgactaagtggatgaatgagaaaatggatgcatgagctagtcatgtttaggacaagatagatggattgatggagggatggatggatggataaacatgaatagatggtcgggtgggatggacaagcagatgggtgggtggggtttaggtgggatggatggaactttagactgggttgggtgacttggaagaatggatggatgggtcgggcacagtagcttatgcctgtaatcccagcactttgggaggccaaggcgggtggatcacctgaggtcaggagtttgagaccagcctgaccaacatggtgaaatcccgcctgtactaaaaatacaaaaaaaattggcaaagtgtagtggggcgtgcctgtaatcccagctacttgggaggctaaggcaggagaatcacttgaacccgggaggcagaggttgtagtgagcgaagatcgtgctacagcactccagcctgggcaagaagagccaaactccgtctccaaaaaaaaaaaaaaaaaaaaaggacagctctcctcaacccaacccaaccccaactccagccccagcctcagcttcctttccctccctcccggcaggtgccccagaccccaccgccggcgcaggaatcgaggacgccaactgctggcacctggacgaggagcagatccaggagcaggtgaagcagctactgtccaatggcggctactacggggccagccagcagctgcgctccatgttcagcaaggtgccgtgcgggccggcggggcgcggggtgcagaaggccccggcggacgccccagcccttcctcaccaccctgtccccggcacaggtgcgggagatgctgcgaatgcgggactccaacggggcgcgcatgctgattctcatgaccgagcagttcctgcaggacacgcgcctggccctgtggcggcagcagggcgcgggcatgacggacaagtgccggcagctctgggatgagctgggtgaggcccaaaccccggtgcgtggtggacaccgggacttcggctcccatgggggctggcccactccaagattagggtctgttccctgaatccgccctccattcgtttggcaaacatttatgagcgcctctaaagtgccaggcatggtactgggcactggtggtccggcagagaacaagagagtcaaaatcctgttcacgtggatctgacaggaggcacaggcaatcaaatgtcattggcccaggggttgatacacacgtacacacgttttctttgttttgagacagggtatcactctgttgcccaggctggcgtgcagtggcacaatctcggctgactgcaacctctgcctcccggactcaagtgatcctacacctcagcctcccaagtagctgggtctacaggtgcacactaccacatccagctaatttttaattttttgaagagacagagtctcactatcttgccaagtctggtcttgaactcctggactcaagcagtcctctcacccagcctcccaaagtactgagatgacatgcatgagccaccacacccagcctacatgttttgtttctttttttctttttttagagacaggatctcactgtgcgcccaggctgaagtacagtggcacagtcacggctcactgtaacttcaaactcttgggctcaagtgatcctctggccttggcctctcaaagtgctgggatgacaggcatgagccactgtaccaagctgacatatttttgtttgtttgttttcttttcttttctttttttttttttgagaaggagtctcgctctgtcatccaggctggagtgctggagtgcagtggtactatcttggctcactgcaagctccgccctccgggttcacaccattctcctgcctcagcctccctagtagctgggactacaggcacccgccactaagtccggctaattttttgtattttttttattagagacggggtttcactgtgttaggcagggttgtcttgatctcctgaccttgtgatctacccgcctcagcctcccagagtgctgggattacaggtgtgagccacggcacctggcctgttttctttttttgacacggactctcaccctgtctcccaggctggagtgcagtggcacgatctcggctcactgcaacctccacctcctgggttcaaatgattctcctgccttagccttctcagtagctgggattataggtgcgtgccaccatgcctagctaattattgtatttttagtagagacggagtttcaccatgttgatcaggctggtctcgaactcctgtcttcgtgatccacccgcctcagcctcccaaagtgctgggattacaggcgtgagccaccacacccagccaacatatgttttcttttttcttttttcttttttttttgagacggagtcttgctctgtcacccaagctggagtgcagtggcacaatctcagctcactgcaagctctgcctcctgggttcatgccattctcctgcctcagcctcccgagtagctgggactacagaggcccaccaccacgcccggctaatttttttgtatttttagtagcaacggggtttcactgggttaaccaggatggtctcgatcccctgacctcatgatccgcccgcctcggcttcccaaagggttgggattacaggcgtgagccaccacgcccagccttttttttttttttttttttttgagatggagtcttgctttgtcacccaggctgtagtgcagtggcacgatctcggctcactgcaagctccgccccccaggttcacgctgttctcctgcctcagcctcccgagtagctgggatcacaggcgcctgccaccacgcccggctaattttttgtatttttagtagagatggggtttcaccgtgttagccaggatggtctcgatctcctgacctcgtgatccgcctgcctaggcctcccaaagtgctgggattacaggcatgagccaccgcaccggccaacatgtgttttctgtaagagacacagagttaatgttattcagccctgcaggccatctggtctctgtcatgaagacctcactctgtctattatagtaaaaaaggcagacacagacatatataccaaacgggcatggtagcatttcaataaaactttatttaagagctgggaggccaggtgcagtggctcacacctgtaatcccagcactttgcggggctgaggtagggggatcacttgggccccggaggttgaggctgcagtgagccatgatcacaccactgcactccagcccgggcaacagagcaagaccctgtctcaacaacaacaaaaaaaggcgcttggcacagtggcaggagcctgtactccctactacttggaaggctgagtgaggcaggaggattgcttgagcccaggagttcgagtgcagcttagacgacatgatgagaccctgtctctaaattttttaaaaaccggctttatttatagatacttactaatttatttgaattttatattattcccacaagttgcaaaatattcttttggttgtatttccctgaccatttaaaactggaaaaataggccgggtgcagtggctcacaccttaattccagcagtttgggaggccgaggtgggcagatcacttgaggtcaggagatcgagaccagcttggccaacatggtgaaaccccgcctttactaaaaatgcaaaaattagccaggcattgtggcggacgcctgtaatcccagctacttgggaggctgaggcaggagaatcgcttgaacccaggaggtggaggttacagtgagctgagattgcgccactgcactccagcctgggtgacagagtgagactctgtctcaaaaaataaataaataaaaacaagtacaaataaaaagggaaaaataaatcttagcgtgcaggctaatcaaaaataaagggtggttcagttttcaccatgggcagtggtttgctagttcgcagacccctgcatgagatggtgataaatgctacccaaaaaaccccaaaacaccttgagaggagtctggaggcctggtttttttgtttgtttgtttttgtttttgttttgttttgttttgagatcgagtctcactctgttgcccaggctggagtacagtggtgtgatctcggctcactgcaacctctgcctcctgggttgaagcgattcttgtgcctcagcctcccaagtagctaggactacagaggcccgggatgtaatcccaacttttttttttttttttttgagatggagttttgctctttttacccaggctggagtgcagtggtgtgatctcagctccctgcaacctccacctcccgggttcgagccattctcctgcctcagcctcctgaatagctgggattacaggcacccacaatcatgcctggctttttttttttttttttggtattttcagtagagacagggcttcaccctgttggccaggctgttcttaaactcctgacctcaggtgatccgcctgcctcagccttccagagtgctgggattacaggcgtgagtcatcacgcctgaccctctaatcccaacttctaacttaccagcggtgtgaccctgtgcaagccgtgttatgtctctgtgcctcagtttgcttgtctgtaaggtgcaaaggctgcgagttgcaacttccgagggtcgaggtgaggggttagcagatcatcaggtggcacacagtgggcactgcggaagtgtgtgttgctgccactgttggcaggaatattgagcctgccccgtgcctcctcaggggccctgtgggtttgcgtcgtcctgagcccccactgcaaaccagaggaaagggcaggctggctccagctactcagcaggtgggacaagctcgacgtctgcccactggaagagggcaactactccttcgacggccccagcctgcagcccaccatggcccccgccccaggtaggagagaggggtctttaccatgccccccaaaaaccatcaccactaactgtggccccacttaccatcatggtcctcttcccaggagagagagggagtggggcagagcaaagcagaccccagtccttggctgttcttccaggactaatcccaacttgtctagccaggaaagagcgagtgccaagggcaggagcaatggcagcccaagtgggcaagtgaagtaaaatgcttaaaacacctgcagtcctgggctggtctggcttggccttctgctagctatgggaccaaagagaggatgagagaggaaaaaaggaggaatcaaacagaaggggaaagtgagatattgaggagagagaaacaagtgaagagaggcagagatggatggagagagggagaggcagacagaggagcagataggaaggaagacagagagagattgaggagagagggaaaaaaaaatttatagcaagtacaggccaggcatggtgtctcacgcctgtaatcccagcactttgggaagctgaggggggcagattgcttgaggccaggagttcaagaccagccagagtaacatggtgagaccttgtctctacaaaaaatacaaaaattagctgggtgttgtgacgcacacctggaatcccggatactcagggggctgagatgggagaatcgcttgagcctgggaggcggaggttgcagtgagccaagatcgcaccactgcactctagcctggacgacagagtgagaccctgtctcaaaaaaaaaaaaaaagaaagaaagaaagaaaagaaaaatagcaagtaggaagaggaagacagacagccagttagttgctcaacctcagtttcctatcaatgtgatgggcctgtactagctcctaacacatacacgcatccttttttttttttttttgagacagtctcactctgatgcccaggctggagtgcagtgacgcaaccttggctcactgcaacctctgcctcctgggttcaagcgattctcattcctcagcctcccaagtagctgggattacaggtgtgcaccaccacgccagggttaattttagtagagatggggtgtcgccatgttggccaggctggtctcgaactcctggcctcatgtgatcctcccaccttggcctcccaaagtgctgggattacaagtgtaagccaccatgcccagcctacacatgcatctttgaagggtggcttcaaggactgggcagatgatgtatgcccatagctttgcccaggcctaaaccccagttagtacttggtgggaaaagctggacacggctcaactgctatagggaccccccctcactgagccatgttgggtgcctctctgcaggctcggaggaagaggaagaggtggcagccacaagtccccgccacacggtatttggccgcgccttgctggctggagagctacactggaatgacgcctacctgcagaggatcctggccagtgactcctacgggcccagcctcacaggcagcgtgggtggggacaaaccgactttcgacccccagggccgcccactgtggctgggagaacctttccccactgcctgtgcccgtgtggacaccctgcgtgcccacggatacccccgccaggccctgcggctggcaagtgccatcatcaacacactccggctgcagcagcggcatcagctagagagctacaagcagcagaaaaaaggtcagcctcagccgggcacgggggctcgcacctgtgatcccagcacattgggagtccgaggtgggaggattgcttgaggccaggagttcaacatcagcctgggcaacatagtgagacaatgtctctacaaaaattaaaaaaaaaaaattagctggatgtggtggctcacacctgtagtcccagctactctgtaggctgaggcaggaggatcacttgagcccaggagttcaaggctgcagtgagctataattatgccactgcactctagcctgggtgacagagcaagacctcatctctttttttttttgagacagagtttcgctcttgttgcccaggttggagtgcaatggagcaatctcggctcaccgcaacctccacctcccaggttcaagggattctcctgcctcagcctcccaagtagctgggattacaggcatgcgccaccatgcccggctaatttttttgtatttttagtagagatggggtttctccattggtgagactggtctcgaactcccaacctcaggtgatctgcctgccttggcctcccaaagtgctgggattacaggcttgagccaccgtgcctggaaattttttttttttttttttttttttttttttttgagatggagtctcggtctttcgcccagtctggagtgcagtggcgcaatctcagcttactgcaacctctgcctcccaggttcaagcaattctccggcctcagcctcctgagtagcttgggactacaggcacccaccaccacacccagttaatttttgtgtttttagtagagatggggtttcactatgttggccaggctcttctcgaactcctgaccttttgatccacccacctcagcctcccaaagtgctgggattacaggtgtaagccaccgtgcctggcctactgaaaatatttttaaaattagccaggcgtggtggcgcacacctgtatttccagctactagggaggctgcggcatgagaattgctttaatctgggaggcagaggttggttgcagtgagccaagattacaccactgcactctagactgggtgacagagcgagactccgtctcaaaaaattaaaaaaaaaaaaagagagagagaggagagcgaggagagagagaagaggaaagaaagaggtggggagggagggacagagagagatggggggagagagaggggaaggaaggaagggagggagggaaggaggctgtatgagccccaaaaaccacattgtgtactagatatgggggtgggggacaggagggaggccaccagttgagagagctagtcgatggggttgatggatcagctatcaggaaattgaacgaagaaaagtgtgtcgtggaggaaacatgggggccctgggacccgagcagagctctgaccaggcttggcagcatcagtgaaaggcccctagattttaaaaattagccaggtggctaattagctgagtatttaaggatgtgcatggccaggcacagtggctcacacctgtaatcccaacactttgggaggtggaggcaggtggagtgcctgaggtcaggagttcaaaaccagcctggccaacatagtgaaaccccatctctactaaaaatccaaaacaaattagccaggtgtggtggcacgtacctgtattcccagctactcaggacactgaggcaggagaatcccttgaaccgggaggtacctggaggttgtggtgagctgagatcacgccattgcactctagtctgggcaacaagagcaaaactccatctcagaaaaaatttaaaaaaagaaaaaggatgtgcaggagttacccaggagaaggggatggaggaagtgctcagaatagaaggaacaccatgagcagcagccaggagggaagagagtacgtggcttggaggacgaggctggaggattggcctccagatgaggcaggtcaccagtatatggaaaaacttcatactggtccttgggggccctaaaggctgttggggctttatcttcagagaggtggagagggaataagggcaatgaggaggggaatgacacttcgggtgttttagaaagcgtccagtggccaggcatggtggcccatgcctgtaatccctttgggaggccgaagcaggaggatcgcttgagctccagaggctgcagtgagctatgattgggccactgcactccagcctgggcaataagcgagaccccacctcaaaaaaaaaagttgaaggtgaccattgggtgagcaggtggtgggcattatggggctaggctggctggcaggtcaagaagaggaatatccctccctcctagagacttgggcaggtgtgtgggcattgagccccctctttccacctgcagagctgctccagaagggctccacctgcatcaccaacaccgaaggatgggtggggcaccccctggaccccattggctgcctctgcagggcgctcctggaggcctgtcgtctggaggaggagacacttaccctttacccaggtactcacatggggtactcttggaggaggtgggacaaccccgcctcgttggccacgccccctggcccagtacccctataaggtaactcccagactctgacccttggccacgcccctacccttggctacctcctctggccagtgcccagagccaataggcttagcttctcctgaaagtgaggccaccataggcctagctgctgctagaaggtggggctcccgcgctcccccaaccccgtgagtgctgggagcttctgggctccctctaaagcctaccctgcgcccaggtctccatgcttgaggccaagggctacagggaccttagggaaggggatccgtctccagcagccctggccctgtctcccccagactcaggccccgagaagcggaaggtggcctaccagcacgtgcctgtgcccgggagccctggggagtcctacttggtgctggcgctggaggtggcactgctggggctggggcagcagcgggccctgccggaggggctgtacgcccaggacaaggtggtgcgcaacgaggagcagctgctggccctgctggaggaggtggagttggatgagcggttggtgcaggtgctgcgcaagcaggcggggctgctgctggaaggtgaggccgcgcccctaggcctggctgttgctgaagggtagggtccagcccctggtcctgtagcggcccggttgctgccagatgggaggccccgccccagccccgcccctagccccgcctcctggtgatactgtcccctcataccttggcagtttctaaaaggagagagccagctctttttcccgccacctagtgcgtgctgccagccagcaactgctgcgtgtgctgaggcgccgcccccttccctcccgggagccagtgagccaagtggttgatgttaaagcgagggcgtcccaccttcatccgcaacttagacaccgcccctgtcccggcctgctcctcattggccccgccaatggccaggccctattgacctgtgtgttgtgagactccgtcccctagcgctacagggagccgtttatccctgccccttcaaggccccctacgctatcggacttgctggtcttggccgctggtcccgttccccaaggcaggtgcagccccacctccaccctctggccccaccttgtatctgagtcctgctcctcacctgcgagtgtgcctggagtctcttcttttccttttccttttttccttttttattttgcgacagtcttcactctgtcacccaggctggagtgcagtggcgcgatctcggctcactgcaatctctgcctcccgggttcaagtgattcttctgcctcagcctcccgagtagctgggattacaggcgtgcgccaccacacccggctgatttttgtatttttagtagagatggggtttccccatgttggccaggctggtctcaaactcctgacctcaagtgatctgcccgcctcggcctcccaaagtgctgggattacaggcatgagccgtggtcccctgcctcctctttttttttttttgagacggagtctcgctctgtctcccaggttggagtgcagtggcgcaatctcggctcactgcaccctccgatcccgggttcacgccattctcctgcctcagcctcccgagtagctgggactacttgcgcctgccaccacacctggctaattttttttgtatttttagtagagacggggtttcaccgtgttagccaggatggtctcgaactcctaacctcgtgatccgccagcctcggcctcccaaagtgctgggattacaggcgtgagccaccgcgccaggcctcctcttttatttggattacccagagattgcctcagtctcagacctgaacccctaccccagagacccatctagccacagccactctacccaggggccagcccaccctctacttaaagcctggggtctagtgagacctggggaagggcagaggcgagcccacacttggggactgagctcaggctgttcctgcagggggtcccttcagtggctttggggaggtgctgttccgggagagcgtgcccatgcacacctgtgcccgctacctgttcaccgcactgctgcctcatgacccggacctggcctatcgcctcgcgctgcgagctatgaggtgaggataggtggccaaggcagtggcagggggagctggggggaagaggggcgggcatggggggtagctcagagccccacccatccagcctgaactcacagcctagttaattcagtctctctcaccctggcatttgatgatgccatgtgcttttcattattattatttatttatttatttatttatttatttattttgagctggagtcctctgtgacccaggctggagtgcagtggcgcgatctcagctcactgcaacctccacctcctgggttcaagcaatttcctgcctcagcctcccgagtggctaggattacaggcatgcaccaccatgcccagctaatttttgttttttgttttttttttttttgagacggagtcttgctctgtcacccaggctggagtgcagtggcgcgatctcggcccactcccagggccgatctcagctccgccttccaggttcacaccattctcctgcctcagcctcctgagtagctgggaccacaggcgcccgccaccacgcccggctaattttttgtatttttagtagagacggggtttcaccgtgttagtaatttttgtatttttaatagagacaggatttcgccatgttgcccatgttgtctcgaactcctgacctcatgatccacccgccttggcctcccaaagtgctaggattacaggcataagccacctcgcacagccgtgctttttattattaagtataaatgtgtgttttttgttttgtgttttttttgttttgagacagggtctggctctgtcacccaggccagagtaaagtggtgccatctctgctcagtgcaacctctgcctcccaggctcaagcgatcctcccatctcagcctcctgagtatccaggactccaggcgtgcaccaccgcactgggctaatttttgtattttttgtagagacggggtttcaccatgttgctcaggctggtctcgaatttctgagctcaagtgatccgcccaccttggctttccaaagctctgggattacaggcgtgagccactgcacctggctaaatgtgtaatattattttgagtttgagaatattcacatgatacatgaaaagatacacaaagctgaaatcttttctaggcagttttatctcagcctatccagatctctccggatgcaagcagggttatcacttttgtgtctatcctgcaagaattgaggtttctgcaaacccataatctggaaattgaacgttgatcctccttttataccagtggtacatcctgtatctattctttgcacctttttctcactgagctttgcatcttacaggatttgtcttatcacacagtacgtgaatcactgcgtagccttccactctaaggacacgtcataaaagaaccacttggaagctgatagacatttacgcaatttccaaaaaaaaaaaaaaaaggcaatgaataacctggttttcatttatcacgtacaccagcagattcacagaaggagaatatttgaaagccaacttggccgggcatggtggctcatgcctgtaatcccagcactttgggaggccaaggcggacggatcacctgaggtcatgagtttgagaccagcctggccaacatagtgaaaacctatctctactaaaaatacaaaaattagctgggtgtggaggtgcatacctgtaatcccagctactccggaggctgagacaggagaatgacttaaacccgggaggtggaggttgcaatgagcccagatcgcaccactgcactccagcctgggagacagagcgagactctgtctccaaaaaaaaaaaaaaggccaactcaatagtaaaccatgcccaaaaaggtgcaacctattccacaccttctgaaaccatccttcagaggtacctataaacaacttgggatccagcctggtacacatctatggtcctagctacttgggaggctgaggagggaggattgcttgagcccaggaattcaaggctgtagtgatctatgatcccacctatgaattgccactgcacgccagcctgggcaacagagcaagaccccatctctctcttttttttgtccttttagagacagtctcgctccattgcccaggctggatatgcaatggcaggatcatagctcttcacagcctcatatacatgggctcaaaggatcctcccacctaagcctcccaccaagtaactgggactacaggtacttgtcaccatgcctggctagttttaaatttttttttttttgagagggagtctcactttctcgcccaggctggagtgcagtggcacaatctcagctcactgcaagctccgctcactgcaagctccaaacctcccgggttcaagtgattctcctgcctcagcctcccaagtagctgggactacagtcacccaccaccacgcctggttaattttttgtatttttagtagagacaggttttcaccatgtcagccgggatggtctcaatctcctgacctcgtgatccacccacctcagcctcccaaagtgctgggattacaggcatgagccaccacacccggcctagtttaaaaattttttttgtaatgatgggatctcattacattgcccaggttggtctcaaattcctggcctcaagcgaccctctcgccttggcccatctctttaaaacacacaaacacacacacacatacacacacacacacacacacacacacacacacacacacacacagtttggagtgtttttccagaatatttagaaagaacagcctgtaagagccaagatttagacaacagacttttctatgcaagaattttttttctcagcaaaatacagcccatggggcctaatttggccaaccacctgttttcgtacagcccatgagataagaatggtttttacatttataaacggttgaaaaaaatcaaaagaatattttgtaacacatgaaaaatatatgaaattcaaatttcagtgtccagaaatggttttattggcacacagccatgtccattcatctgtgaattgtctgtggcttttctggcagaacaatgacagaattaagtcattgaaatacagatcagtggccaggcatggtggctcatgtctgtaatcccagcactttgggaggccaagacgggcggatcacttgaggacaggagttcaagactagcctggccaacatgatgcaaccccatgtctactaaaaatacaaaaattagggccaggagccatggttcacgcctataatcccagtactttgggaggccgaggagggcggatcacctaaggtcaggagtttgagaccggcctgaccaacatggagaaaacccgtctctactaaaaatacaaaattagccaggtgtggtagtacacgcctgtaatcccagctactcgggaggctgaggcaagagaatcgtttgaacccaggaggcagaggttgcagtgagccgagattgcgccattgcacgccagcctgggcaaaaagagtgaaactccgtctcaaaaaaaaaaaaaagaaagaaaaaagccaggtatggtggcacgtgcctgtagtcccagctactcaggaggctgaagtgggaggattacttgagccgagaagtttgaggcttcagtgagctatgattgtcccacaggactccagcctgggtgacaacagagtgagaccctgtctctaaaataagtaaatgtatcaatttataaacaacactgcagtgaacatcttgcacacacatcttccatcatcttgggctctcagggctctgctggctgaagtggggaggctgggccaggaggcttctctgtctcctagagagaatggggacagcagcccctcctcaccatggctcacttctccccttacccaggctgcccatactggagacagcatttcctgctggagaacctcatcccagcccgctggactccatcatgagcaaccgcttcccccgctggttcatccttggccacctggagacccgccagtgtgaactggcttccaccatgttgacggccgccaagggtgaggctggcagctgtcccgattcctttgtcttcctcctctgtcatctccttcttccttccctcttaactttcctgcctcctcttatcctttcacaaacttccccctgcattctttgagcacctcctatatgtaccggacactgtctcaggtgctggggatgtagcaggtgacaaaactgtcccagatcccctgccctgtggaatgacattctagtggggagaagagagtgatgcagtaaatgagacggtaacaggtgccatggagtggaataaaacagttgaacatttaagcagagacctgaagatgaggtggagccttgcaggtacctggtgtcttagctcaggctgctgtaacaaaacaccagagactgcgtgacttcaacaacaaaaatttattttctcacatttctgtaggctagaagtctaagatcactatgtcagtatggctagctcctggtgagggctctcttctcagcttacagacggccaccttcttgctttgttgagagttggggggagtgaagtggggagtagagaggaaagtgagagagaggaggctgggagagagagagagggagaaaggagagatagtagggggggatagagagagagggagagagaggagtcaggtgccagagaggagagagagaagaaagagaagagggagagaggagagacagagaggagaagttaaatttctccagtgtatcttcttctaaggtcactaaccctctcatgagtacctgaacttcatgacctcatctaaacctaattattggctgggcacggtagctcatgcctgtaatcccagcactttgggaggctgaggcgggcaaatcacttgaggccaggagttcgggaccagcaaatcacttgaggccagaagttcttcaagaccagcctggccaatatggtgaaaccccatctctactaaaaatgcaaaaattagccaggcacagtggtgcacgcctgtaatcccagcgatttgggaggccgaggccgggggatcacctgaggtcaggagttcgagaccagcctggccaacatggtgaaactctgtgtctactaaaaatatgaaaattagctgggcgtggtgaccggcacctgtaatcccagctacttgggaggctgaggcaggagaatcacttgaacccgggaggcaaaggttgcagtgagccgagactgcaccgttgcactccagcctggacaacaagaacaaaactccatctcaaaataataataataataataataataataataataataataataaaagctaacatttgagcagctccttgccatgttaaggccttgccaagtatgggcccaccaccaccctgtgaggtgggttccattgcctgagtgttacccattttacagatggggcagccagggcacagagaggtgaagtgacttgctcagggtcacacagctagtgggtggcaggaccaggatttgaaccctggcattctgggtgtgcaaccaatgcccttgagatgagggagaggtccataggatccctaggtggcttttcttttcttttttttttttttgagatggatattactctatcatctaggctggagtgcagtggtgccatctcagctgactgcaacctctgcctcccgggttcaagcgattctcgtgcctcatcctcccaagtagctgggattacaggcacccgccaccatgcccagctaatttttgtagatggggtttcgccatgttggccaggctggtctcaaactcttgacctcgtgatccacccacctcagcctcccaaagtgctgggattacaggtgtgagccactgcgcccggcccctaggtggctttctgtaacaggaaagggccagagaggagataattggcaagggctaggggcactgaggtctgaatcttcacagaaccatggcccagtacacatccctccacactcacacatgtgcccctgggtggaaggatctgtgtgaacaggtcgggtggtggtcagaggctggtgctgaggtgtatccgatggtgtcctctgtcccgcccttcacccaggagaccccaagtggctgcacacggtactgggctccatccagcagaacatccactctccggccctgctctttaagctggcgcaggacgcctgcaagacagccaccccggtcagcgccccaccagacaccacgctgctgggcatcgcactggagctggggctgcaggtgagggctgccaggtggatgcgggagggcgatggtggctcggggccaggactgactgtgagctgcgcctcccggggcatgggctgagtgtgagccacttcgctgggggcccggcatttgcgtgagctattcctctgtggctggggactgagcgagaaccactcttggggcggggactgtgagtgagacacacctctgggggcgtggcctgagtgtgggccacttccttgggggcgtggcatgagtgagccactcccctgggaatggggactggatgaatcgtgtctctggggatggggtcttcacttgggccacacctctgcaggtggggcctgagtgtgaacctcacctttaggggcggggccacagaaggccaaggtctgtaagtcatgggagtgtgggaatggggttcccagtagggatgaagcctatgaattattaatagaatccgtctatggaggagactgaggtctaggggagagttgtcactggagcggagaggcagggcctgcaagccagcagatggatcgcaagcggagcctgggggtggggcctgggagtgatgtgctattggttaaggatcatgggtgggtgagtttgaagctgagggtgaggcagagcctagcaataaagagcttccttgggggcagggcctgaagaggattgccgcctaaggagagggattcaccactgaagggctggcctggcggaaggtcttgaagatgagatgccaactctaggggtggggtctgtggttgaaagccctgtatgagcccgggtgtggtggctcacatctgtaatcccacactttgggaggccgaggggggcagatcacgaggccaggagttcgagaccagcctggccaacatgatgaaactccgtctctactaaaaatacaaaaattagccaagcgtggtggcacgcgcctgtaatcccagctactcgggaggttgaggcaagagaatcgcttgaacccaggagggagaggttgcagtgagccgaaatcacaccactgcattccagcctgaaggacggagcaagactccgtcttggggaagaaaaaaaaaagtcctgtatgcagggcctgcaactgagtgtctgggtcatccccaggggctgaacaaagggtggtcctgcaaggccaaatcttgggtgcagcttgctggaaaggtgtcattggtagggtgtgagtgccatgggacctggaggagggtggggtctgcaggatagacaggtaaggggcggggcctcaaagggtggcagaagttcactaagaagataaggaatagggccgggcacagtgcctcacacctgtaattccagcattttgggaggccaaggtgggaggattgcttggggccaggagtttgagattggcctggacaacatagtgagacccccatctctacaaaaaactttaaaaattagccaggtgtgatggtgcacccctgtagtcccagctcctcaggaggctgaggcgagaggatcgcttgaggccaggagtttgaggctgcagcagtgagctatgatcgcgccactgtactccaggtaacagagcaagaagaccccaactctaaaagaaaaaaatagaaaagaaaaaagaagttggggccaggccctgtggttcacacctgtaatcccagcactttgggaggccgatgcggatcgcttgaggccaggagttcaagaccagcctggccaacacagcaaaaacccgtctctcccaaaaatcagccatgcatggtggtggacgcgtgtagtcccagctgctcgggaggctgaggcaggagaatcacatgaacccaggaggtgtaggttacagtgagccaagagaccacaactgcacttcagccccggcgacagagtgagaccctcaaaaaaaaaaaaaaaaaaagaaaagaaaaaaaaagaaactggggaccttcccagctagaacaaacaagggccagcagggtgcagaatcagccctggacagcctcctgattggagccgttgtagtgtggggagcaagacaaggagctttcagaggctactcaagaggtaggagcttacagaaggcagggtctgcaggacaggacctgtggatggggcctcaggggagaggcaaacacgtgagctgctgattggtggtgggacctagtgaaggtggggcttatacagcaggtacttagaggcaagagagaggagccaacaggaagcatggaggtttcaggagcgaagggacaggttggtttgttccggcataggatctatgaggtgggatctggggtaggatctgtgaggactcacttcagaagaacagcaacaacagcagtgatattaagagctgacattacctgagagcattttcaagcaataagcaccttgcagaaagcttcacctacgcaattttgtttacttctcacaacaatcaggctgggtgcagtggctcacgcctataatcccagcactttgagaggctgaggcgggcggatcacttgaggtcaggagttcgagaccagcctggccaacatagtgaaaccccatctctactaaaaatacaaaaattagctgagcatggtggcgggcacctgtaatcccagctacttgggagcctgaggcaggagaatgcttgaactcgggaggcggaggttgtagtgagccaagatcgcaccactgcatgccattctgggtgacagagcaagattccatctcaaaaaaaaacaaaacaaaacaacaacaaaaaagaaaaaacaacaatcctatgagacagatactattttatctccattttctaggtaattgaggcccagaaagttgagatcacttacccgggttcattggatcagctttaacctccaagtgtttctggggtcctccatctcccaacgcccctccataggccagcccaagactcaggctaacccccttctccccacccctaccttgcaggtgatgcggatgactctgaacgtaatgacctggcggcggagggagatggtgcgctggctggtcagctgtgccacagagattggtgagagcccctaaggggacctgccacccacttcgctgttctggttctgcagagcgcactgagagaaccaggcagacaagaaagagagaagtggcggggtgcggtggctcacacctgtaatcccagcactttgggaggccaaagcgggaggatcacttgagcccaggagttcaagagcagcctgggtaacatagtgagaccccatctctacaaaaaattaaaaattagctgggcgtggtggcaagtgcctgtagttccagctgcttgggaggctgaagcaggaggatagattgcttgagcccaggaggtcaacgctacagttagccatgatcataccactgcactccagcctgggcaacagaggaaaacctcctctgggaaaaaaaaaagagagagagagagagagaagcaagccaggcatggtggcacacacctgtagtcctatccggagggctgaggtgggaaaatcacttgagcccaggagattgaggttgcagtgagctgtgattgtgccactgcactccagcctgagtggcagggtgagaccctgtctctaaaaaattgtttaacaaaaagaaagagggccaggcgcagtggctcacacctgtaatcctagcactttgggaggccaaggcatgtggatcacttgaggtcaggagttcgagaccagcctggccaacatggcaaaaccccatctctactaaaaatacaaaaattagccagatgtggtggcaggtgcctgtaattccagctactcgggaggctgaggcaggagaattgctggaacctgggagacagaggttgcagtgagccgagaactcactaccgcactccagcctgggtgacagagcaagactccatctcaaaatgggcagatcacaaggtcaggagattgagaccatcctggctaatacggtgaaaccccgtctctactaaaaatacaaaaaaactagctgggcgtggtggtgggcccctgtagtcccagctactcaggaggctgaggcaggagaatggcgtgaacccaggaggcggagcttgcagtgagccgagatggtgccactgccctccagcctgggcaacagagcgagactccatctcaaaaaaaaaaaaggaaagagaagtagagactcttcagagactcttctccgattccagcctgtgctcagggcttggccgggagggaatggctggccagcatggagctggacaaaggcctagaggctggccaggctaatgtggctgcagggggttgagggggttgcagaaagaggctccaaagcttagccttctacacacgtgattcccacctagtccaggtgcgccctgatgatttggaaaggaagtttctgttcagcatggtgtggaggtggaagtggaggtggcagtgtcatggttaacccacgcatacatgtacgtgtgtctgcccccgctcctgacggatttccctccctcacctcccaccaggcccgcaagccctgatgaatatcatgcagaactggtattccttattcacaccagtggaggcggctaccatcgtggcagtgacgggcaccacacacgccactctgctgcgactgcagctggacacatcgcggagggaggagctctgggcctgcgcccgcaccctggccttgcagtgcgcgatgaaggaccctcagaactgcgccttgcctgccctgaccctgtgcgagaagaaccactcggccttcgaggcggcctaccagatcgtgctggacgcggcggccggcggcctgggccacgcccacctcttcactgtggcccgctatatggagcaccgcgggctgccgctccgggcctacaagctggcgacgctggccctggcgcagctcagcatcgccttcaaccaggacagccaccctgccgtcaacgacgtgctttgggcctgctctctcagccactccctgggccggcacgagctctctgccatcgtccccctcatcattcgcagcatccactgtgccccaatgctgtccgatattctgcgccgctggactctctcggcgcccggtctgggccccttaggggcacgccgggccgccaagccactgggtgccgaccgggcgccgctctgccagctcctggacgcggcagtcaccgcctacatcaccaccagccactcgcgcctcacgcacatcagcccgcggcactatggggatttcatcgaattcctgggcaaggcccgggagaccttcctgctggcgcccgacgggcacctccagttctcacagttcttggagaacctcaaacagacctacaagggcaagaagaaactcatgcttttggtgcgggagcgttttggttgagggacagtggggtgcgtgggagtggggatccccctcgcccctgcgtcccccacccttgctctccaattaggcccacgtggcatttcagtattattaagtcagggaaggagcccggctggagatgggggcagggggagcagcatcctgccacgtgtgtgcctgggagtctgtgagcaagtgtgcaagactccagaagcagaagccatactgccacccagaagcctggaaggggtgtgtgcttgggctgctggtatgaccccactttgggcaccccaaaagcaataggcaaactccccttacccagactggcttgggctccaggagggaggctgggaggcaggactttccagaaatcgaccctctaagtcaatgtagcacattttcccccaaccccaccctgggtggccaagggtcctcccccaccccctactgctcagggccccccattatgccacctccaaagtggctgcccagccaggaccattggctcacccccactgaaggaattgaagaggcctcaggcctcagcctcatacctcacccccttatcctatccggccaggacccccatttccttgggcactagggtcccagggtgggctcagggttggggaagtcctcgctgccctctcttctcacctgctagtcactggacgtacaactcaggaactgagcgaggctcacactgccccttccaacctggggttgggggacacagacgcgagagagccggagacccccacccccgatctggaaaggaaagagacctgtatcttggtgtttttctggctttttcaccctttcgcctcctgtctttctgcttcgccccttcatcttactctgtttccatttttcccggcacttacctgcctttctctctgcacctaagtccctgccgccctctctctttggccatccttcctttcccccaccttgacccagggaggagaagggagaacatcacccccccaagtcacccccacatcttttcccttcttgtatattaaggacaaaataccacatcattttgtaactttttttctatttattgaacggtgtattacatgtccttttcctttttttttttcaaagattgaacagaaatttttctttttaattttattttgagactggggtgcatctccagagccactcacaccctcaacctcgtttcctccgcaaaaaaaaaaaaaaaaaaaaaaaatgtctggccttatttctgggtgcagcgccaagcgaggggtgggatgggagcgactgctggcttcattccatggtaattatgtaaatatttccctttttttttttttggtctttctctgttgcccaggctggagtgcagtagcgcgatctgggctcactccaacctccacctcccgggttcaagcgattctcctggctcagcctcccaagtagctgggattacaggcatgcgccaccacaccgggctaatttttgtattttttagtagagacggggtttcaccatgttggccaggctggtctcgaacacctgacctcaggtggtctgcccgcctcagcctcccaaagtgctgggattacaggcgtgagccaccgcacccggccttatgtaaatatttcaaaacagagatggacagctcaccatgagggaacacagggctgaatgcgttaccgctgtcatttaatcgtcaccacagccctatgagttggtaggattatcttttccattttacagatgagaaaactgaggttgcaaagtggaaagaaagggcacccagcggccgggcgcggtggctcacgtctgtaatcccagcactttgggaggccgaggcgggcggatcacgaggtcaggagattgagaccatcctgactaacacggtaaaaccccgtctctactaaagatataacaaaaaattagccaggcgtggtgacgggcgcctgtagtcccagctactagggaggctgaggcaggagaatggcgtgaaccctggaggtggagcttgcagtgagccgagatcgccccactgcactccagcctgggcgacagagcgagactccgtgggtggggggcaggggggaagggcacctagctaggacgtttgatttaggacctggttggggccactgacccctgcccacccctgactgcagggtccttgagcccctaggaagggccaagatgggggtggggggcgccctggctccagacaccaatgttgggggtccttgtctccaaattgctgagcatgggaggctgtggcaggtgttggtgcagctggatggggaagacaccccgatcaaaagcgggaaccccgggtttagactcgacctcggtgggcggggctctggccaagagaagaaaaacggagtgggggtggtctgtgcgtggacactcgccaggggacgtggccagggcgtgtctgggatcttgcgccactgaagaggctcccagtcgtcaaatagagtgagggatgggatccaaaggacggcgagaaagcccgtggttgtctaaacgtccctggctccccgagaagcagtttcctcggggccttcctgccttttggatgaatggagatgctgtgtctgggtcactgccagagccggggcaggagaggacagaggcttcccggagcggcagggcccgtcgctagagggcggggcccgcagtcgggggcgggactttggcggcgctgtgcatggggattggcttttcgcaccgcccctccgctcgagtgggccaatcggagacggccccacctcctgccccgccgcgcgtattccagcaggtatgtgcgggcggacccgggactgccccgcgcgctccgtggcgccgcctcgaggtctgggacggtggaggtgggtggagagcccggagtgcaccccttgtggtccctgccgccttcggacctgggggaccctttactgtgcccctcaggtgtcacccacgaatgttcccatgttcctggggcgtcacgcaggtcccagccacatccaaatgtccccccttaagaactggggtttccttcatgtcacatccctcaaacccaagttcccctccagcattctcagataccaggcaccccaaatcttcccctgaggcctgagtaatcccgtaggtccaagttgcccccaaatgtcactagctcaagaccctcagatcctggttatcgccacatgtcacccctcaggctcagcgtttccctcagggtcaccccaccaccaccacttcagatcagcttccatcctcccttgatcagcgatgtgaaaatctttccactctagggtttccctcatggtcaccccacgatccaggacacccccaaggtcacctttccaagcacaggataccctgctgcacagagcaggtggggcagggatgggcaggcaggagcccggagtgccaggatggtaaattcaggccaatcaaaagctgaaactccagcgatgggaggcaggagtgaatcacagaccagaccttcaggaatgaagtcagggcaacttttatttacttgaacaacagacatgacacacagcacgatctctcctctccatcccatcccaagcttctgtccacgactacccagggtggggaaaaaggcaatggcccagccccgatgacctgggggacttcagtgtgcctcctcagtcccacccagaaaaaagcctcctcccatctgatttcaagatagtggagaaaagccaggcacggtggctcacacctgagccacctgtaattccggcgcattgggagactaaggtgggaggatggcttgtggccaggagttcgagaacagcctgggcaacatagtgagacctgcccccccatctctacaaaaattaaaattaaaaaaattagccaggtgtggtggcgcatacctgtagtcccagctctactggggaggctaaggcaggaggatcacttgtgcccaggaattcaaggttgcaatgagccatgatcacaccagcctggccaagatggtgaaaccccgtctctactaaaaatacaaagattagccgggcatggtggtgggtgcctgtaagcccagctactcaggaggctgaggcaggagaatcgcttgaacccaggaggcagaggttgcagtgagccaagatcacaccactgcacttcagcctgggcaacagagtgagactccgtctcaaaaacaaacaataaaaggccaggcacggtggctcacagctgtaatcccagcactttgggaggctaagacgagcagattgcttgaggtcaggagttcaagaccagtctgggtaacatggcgaaaccccgtctctacaaaacataaaaaaaaattggccgggcgcagtggctcatgcctgtaatcccaacactttgggtggctgaggcgggcagatcacctgaggtcaagagttcgagaccagcctggccaacatggcgaaactcggtctctactaaaaatacaaaaattagccaggtgcggtggtgtgcacctgtaatcccagctacttgggaggctgaggcaggagaatcgtgtgaactggggaggtggaggttgcagtgagccgagatcgagccattgcactccagcccgggtgacagtgcgagactccatctcaaaaaaaaaaaaacaaaaaaaaaaaaacagagtcctaactcttccctgccctgagaaccccctcaaggcagggaggatcagctattcccagcgcctcaggactaagcacacctgcttgtgtcccttctgggtccacaaggaacttgttccatgccccacatgtggggcgggtgtcactgctcctcccggcaagttagaaagctgcagggcccagcaagaaggggccaggtcaggtcaacccagcctgataccggaagccaggagttggcatttaacggtctggaggcccaaggcagcttcctcttgggtaactggctgctaggaaggtgcgggccgggccagtgcccctgccaggcttgggagaggaggggccaagcctccaggcccggaaaggacacagctggcttcccttttaatggaagggccacccactcacccacctatctatgctggcaccacagcccagcctgagctgtggccatgcaggggtccccagttgcagagttggggatcagggcctgcagcacacatttgggcccagccaaccccacccaccacatccctcctccagacacaggtctgattctgagtcctcatctctgctccaagcatcagcccacccagggaaggcaggggctgcaggctccaagggggcttgacccctgttcctgctgaactgagccagtgtacacaaaccaactgtgtttcagctcagtaggcacgggaggcagagcccagggaggccaggcagcaggatggcaggcagacaggcggcagcaggggacaggcggcaaggccagaggaggtgagggcctggggggcggaacttagccactgtgaacacgacttggtgtggaccctgctcacaagcagctaagccctgctcctcaggccaggcacaggcttcggggcctctctgccaccccgtccccgggcagcatcctcggtggcagagctcagggtcggttggaaatccctggcaatgtgatttgtgacaggaagcaaatcccatccccaggaaccccagccggccgtggcacaggggtgaggggggcaccgggcggggccagaggctggcacctggaggggagaaagagagagagagcaaaggaggtaatgagatttggggacacctcccctccaggtccccagatgcttcctttgatcacagggaagctcttttctcatatgcaggagccaccacacggggagctggagcctagctgtgccctccgttccagccccaggactggagaggcagagatacctagagggcccatgcgggacaaggaggctacagcaacttgcatggccaagctcccccctcattgagccctgggcaggccaaatggggccatggggagaggaagccaaggggggccaggcaggcgggtgaggaagtgatctcaccccagctggcgccacttcctagaagcctggagggcaggaggaaaccaccagggcctccccccccgtggcccggtctcctcagtggccagggcttagcccacacccaccagggcggatgccggcagcaaggcacccccctctctttctagacacgcaccccccgccccccagagcacaggatccaagctccaagatacaggcctctccacccaaacagcccaaggttcaaatccttgctccacagtttcccaaagactctccaaagcttcagtttccccatctgtaaaatggagccaagagcctcttttgcatagcccagtgagatgtcaccgagtatgtatgtcactcagtaagtgcccagcaccagggcaagatacaggattttcaggacccggtgcaaaatgaacacgtggtcctctagttcgaaaactaagaatttcaggccaagcatggcggctcacgcctgtaatcccagcactttgggaggccgaggcaggagagtcacctgaggccaggagttcaagaccagcctgcgcaatacgacaataccccatctctacaaaaaaaaaaaatattttttcttttttgagacagggtctcactctgtcgccacggctagagtgcaggggtgcaatcacagctcactgcagcctcagcctcccaggttcaagtgatcctcccaccttagcctccggggtagctgggactacagctatgcaccaccatgcccggctaattttttctttttcttttctttttttttttttttgagacagagtctcgccctgtcgcccaggctggagtgcaatggcgtgatctcggttcactgcaacctccacctccagagttcaagcaattctcctgcttcagcctcccgagtagctgggattacaggtgcccgccaccacgcccagttaagttttgtatttttagtagagacggggtttcaccatgttggccaggctggtctcgacctcctgacctcaggtgatccgcccacctcggctttccaaagtgctgggattacaggcgtgagccaccacacctggccctaatttttgtagagatggggttttgccatgttgcccagactggtctccaactcctgggctcaagcaatccgcctgcctcagcctcccaaagtgctgggcttacaggcctgagccacagtgtctggcccacaaaaaattcactaaaaaatcagccaggagtggtggtacacatctgtagccccagctactcaggcggctgaggtgggaggactgcttgagcccaggagtttgaggctgccgtgatctatgaccatgccactgaactccagcctaagtgacagagcaagaccctatctctaaaataaacaaaaacaagtttaaaaaaagaaaataatttcaggctgagcgcggtggctcatccctataatcccggcacttcgggaggccaagacaggaagatcgcttggggccaggagttcgagaccagcctgggcaatacaagacaaaaaaattaataataataaaaaaaaattcatgaccccagcagtgcaacattaaactaacctccaggtccctccaagcagggctgccgtgagactgcccgtttcacaaatgcatgaagccagccctaagtctttagtgagtggagcttcttttgataagagcccaacacctggctagcagactccagttttggagcccaagtctgcccagatttgaaagccccagctctgcagcttctgagctgggtgactctgggcaagtcactcaacctctctgggcctcagcttccccatctgcaaaacagggataataagtatggacttcataagtcatggtgaggaccccatgagtgataaacatgatcacgacagagctgctgctgtctttgccaaggcaaaggataacggaaacgtgggtgtctcacaccaggaccccagtgtccgcccgatgtggtggcgctcaccacttcgagacaggcggcgagtgatgtcctgttttgtcccctccctatacacacatacacacataccagccactctttcccatcaggccccagcccagccctgtccccttagggtctggaggcgccaactgggagcaggcgaggccccgcagggcggccagcctccctgggccgcctccggaagtgagacagcacattcgtgtcccagggacgagaacgggaagggcggccatttggccaggctcgtttcctgtggggtttcccctgcacagagcccagggccggggccaaggccactccccatccccgcaggcacaaaaggtctgggtcttgagtggaaggggtgctgccatgcaggtgcccaggagacagggtcccctttaccaatcatggtgcacttctcaggctcttgggagatggtgtccagggggaaaccaagctcctagcagctggaggcatgagggagagggcgggcccctgggctggggagcaaagcaggccccaggctgcatcaggacaccccggccagccaatgcatgtgggtatgcctgaataccccctccagacagcgtgtgcgtggaccagacacacaagggtatgtatgtgtaccgctacccccccaaccccatgctccaagaatgaatcaggggcagcttccgccgggggcgccaccaccacctccgcccccaagcctggtccccaaatactttccaccctcacagagcagctgggatcggaaaataccaagggctgcaggccccgccctgcccgccgcgccacccgccctcccagcctgtcactaacgctttgcctaatgggcccagactctcagcagaagctccgtgggctgggcctcgagccagccgccaacctgggctgcccggccaagcgccgcctgaccaggagccccccgcccctctgccccaatcccagtgcagcgacaataacaaccgccccgatgggcagccctcagagggtggcactgggtagggaaagtcagggcactgacaagtgggtgggccccgctgcccacccagggctggggtggggggaggctcaggaaggggtgagtaagtgagggctgaatcacttgttataaataggggaaccatgaaagtgacatcccagcccccattgcgtcccgccagtccacactctaacccccacttagactttaatctttcccagaccaatcacagaattcccaggggccccctcaccttcatgttgggaacccttagtagagtggtacaccccgtcatcaggtccacccctgccttctccccacataggtacattttgcagtgagggcctggctgtgggggtcccctggccttgaatgcagtcactggtgtctgcgccctatccacctccctcaacgcaccgattcccaggcccaaggctcagggcctctaggctctccaaggcattctcagggtgtgggccaccacagtcctggagggtgaccccagaacctaggccaggcgggaggccagggggcttggcatcttcgaagtcagttccccaggcaccgaggccccacatcctagaccacccagccctgctctgcccagggccacagctcagtgaccacacccagggtggcgccagctccagcaccctggggcaaggcgtcgctggagcgtgactcagccgtgcccagcatggcggcgcccttctctgcccagggattctcacccacacccactgccctccgctcaacatccttcccaggcgaccggccctaaaggacacaccttccccagacacacctccgtgtccacccaggacaccaggagggaagaaggcggccaggggcaaagtgtacacttctctccgtcccatttccaaatgcttcccatttatagatagaataattaaggctcagagattcagactggggcttaaggtcatggaataagtcttaaaaaaaaaaaaaaaaaaaagccaggcctgactgtggcctaaaacacatccaacgtggaaaacagaggttacaggaaggagttttctcaagatcgcccaaggttcctggcgccgttattcatggaggacagaatcccccacccagctttccaaggtgaagggcaaactccaaaaaatgctttaagaggtatcaaagcaccacctagatcgggcgagcgggtcaccccagtgtacccaccgggctaattaccctgggattgcagatagatgggggcctgccccgcagctgcggtctgcatggaacatctggcgtccacttgcattgttagagggtgggcacgacacgggggtccctcctaaagcatccgcctctgctgtctttctccagcgagcaagggtcggcggaggctcagtggccaggccagcacagacaggcccgaccctctggacacgccctgtcacgcatgtgctccgcgtgccagccccaggccaggccggcacctattttagggccccctctagatccacaggcaaggcctgcctgttggggtcttgaaggagctcccagaggacgtgctgcaagggcagagggccatgggtgcctcacgggatcagagaacaaagctagcaccagccccagggcctgtgccttcccaggacatcggcatgtgaacacatgtacccaggctggcccgggcagggcatgtgggcgagcggacagggtgtgtccaacatcacctcgcctctaagcctgggcacctgttgggtacagccctccagctggggcaggactgccagaggacaccccttatgccaggggtcccccagcccccagcctcaccctcatagaccaggagtcagaggctgccagctggggaaggttgggaagggggcaggtgacaaggagccagctgcacagccaaaacattcaagaagccactgggtctggggcctggctgggctgggctgggctgggctgggcaggaaggtcagttagggctaagggctttaggggcagccaaatctagtgctaaaatcagaaaacagtctggggctaagacagaggggtcggggttcagtctgggcccttttaacctcctccttcagccaaaaggcacggggaccccaagctgcacagggctggtccccaacctggctttccttcctatgcaaccttgaatgagcgcttttctccgaagggaaaggagacatccccccagctcccaccagcccctgcccaacaagagaccttccccctacccagcgggcgacacgtcaagaacttggaccggtatccacccccgcccccacccaaagaactctgagagacccccccaacccattcctcccgtccaaaggccaggtcggggggctaggagtggggtaggcatatgcatatccaagcccctcaacccaagccccatgtccgagccggacacaagccctcccaccctgacaactctctgcccaccttgacctgcccaagtcgcgcggggacccgccctccccaccgcattcccatgcgtcccctggggggtcggggtggaggggccactgggaagggaacagaggccgggccgcccttcccccgctccgtagggggcgccccgggactccgcggccgccgtcgccaccgtcagacgcactgtccccgatccccgacccaccccgggcggcggggcgctcaaggcgcgcggggcggcgccctcgccttctcgcaacgctcttggggacccgccgggcgcagccccactccgcccacgagccaggcgcggaaaagttgccggcgccgctgccgccgaggcgccgatcgctcccggcctccctcctgggtccctcctgacttccacttacccgcggggggaggggagccgggcgcgcactccgggctccggccgccgccccgggccgggccggccgaggctcaggcgggcgggctgcgggcccgagaccggccgggggcggccgccggccgcgctccaccccactcactggccggccagccgcggggccgaatcgcttttaaaaccttcccgtctcctccccccctccccgggccgggcagggggcgggcgcggggcggggcaggcgtcgccgtcatgtgcccccgagccggcccgcccccagtttctctgtcctgtcccccaactctgtcccgtcccccaactcaaggccaactttctccctccttgtcccgaaatcagcctgggccccatacccagcccaacttccccctctggaccctgaacttgagtcccagtcccgagttttaagcccaaggctctgtctgcgggggtagggtgggagcaaagggtctaaccccctatcccacctctggaacccctgttggtctaaggcctgcgcctgcccagggagaggcaacccaggaggccgtgagcccctgggaatagagattggtgaggggcggtttggcgggtgggctcggtcccagacccagggcacactgggcactgcagacccctcccggggaggggggcctgggtctgggtattgccctgggatgccaccaaacaggaacccccacttgctccagttccacagcgccttctccagccttaggaagttcctcctcttatcctacctaaccctctcctgctgccatagaaaagactttctggtcccaggccatgcagcccctgggtctgggtcccctccccctaggcttcccggcaccctcccccacccgctgggacctctgggaaactccccgggctcccggagtagctctgggagcaaggccctccctggatccctccctctttcccggtgtgcctgtctttcccgctccatcctccagcctccaccgggaggaacgcggctgcattgttcctcaggaggaggccctgcctcggggcctggcccagtgcccaggtgggtggccaggaacaaaactctgagatcgaggggcggggtgccctctgcaaccatgccagtctccttgggcatgtcccgctgccatctgccctctccaggactcgacaaaggccgatggacccctatccaccacccacgaccaccatcgtgtcacagtgggggtctggaacccgcaggacccttcccagacctgggtgggcattgctttgggggatgatgttttccactcagcccccaatatttttgaagtgtcatccttggggctagggatccaattcttcatccacgtcctgggtggtaagatagcagcctccccttttgagtaactctgggggtgggggcgcgggggtacccagcagcaggccaggccctccaagggactggagggactagttggatgcttctgtgtcaccttgcaccccagaattcctccagggtcccccatttcatcagctcagctggctctcaccttgctacctggtggaactggggagagggagttaggagccacacccagctaccatcccgtggggcccagccctggggactccagggccttttcttccctgtggggcccaaggggcaggctggcccaggatgcaggatctgacaggttggggcaggagggggcagagccgcctagtggggccccaggggaagatttggggtggcacagaattccccaactcagggtggggcgcagaaggtgggagcaacttaccacatggccttctgagcagctacacacaagaatggcatttccagggcgggcctggggtgggggtgggggtctccctgtaagggacacacgcacacagacaaacttgtcattgcaaaagtagaaagtgaccaaattacaatgacaaacaaaactcggatctctaccgcatccccatccatattgcccctccagaattcccttcaccccataataaggccttccatccagacattgcctgtcccgtcatcagtccaattcacattcagggagaacacctcctccatgctggcctctggggatacctcttcccccagattttttttttatctaattttcgctgttctgttgcctgtggcttggaccacaccccggctcactagtatccctcagcccaggcttggagggtcctcccagaacccccacctctccctctgggtcccttgacatttacttccacaggccccggtcctgagcctgccggtttacccaggggacagcaggtgagggagtgatgaagggacagggcgaaggtgagaccaggtcaagtggtcaaatggcatggcacacacacacacacacacacacacacacacacacaccacacacccttttgttcattctacaaacattgagtgcctgctgtatgtatgtcaggctctgttccgggcatttggggacacagaagagaacaaaacagaaaaaaaaatccctgtacttttgggaccagcatctatgggagaaacaaacatgataagcagatagataggtataaagatatataatgtggccaggagcggtggctcatgcctgtcttcccagcactttgggaggctgaggcagcctgatcacttgaggtcgggagttcgagacaagcctggccaacatggtgaaaccccgtctctactaaaaatacaacaattagccgggcatggtggcgcacgcctgtacccagctactcgggaggctgaggcaggagaatcatttgaaccaggaggcggaggttgtagtgagccaagattgctccactggactccagcctgagcgacacagggaaaccctgtctcaaaaaaaaattatatatctatatatatttttaaaaattacatatctatatatttaaaaattatatatctatatatattttaaaattatgtgtctatatgtttaaaaattatatatatattgttttaaattatattatatatatatatatatatatatataaaatgtgttgggtggaaagtctatgggtaatctagaaaaaggcaagagagatgagagatgaaatgagtggaggttaggtcaggaaagtcctccctgaggaggaggtgactttgaacaaagacttttaggcactgagggaaaagccaggaagacatcgagaggaagagagttccaggtagagaacggccagtgcacaggctttgcggtaggacggtgcctggaacattggaaaaccagcaaagcagaccggtttcatggaggcagagagaggagtggaatggaagaagaacaaagatttgttttgttttgttttgtttgagaaggagtctcactctgtcgcccaggctggagtgcattgtcacaatcttggctcactgaaacctctgcctccccagttcaagcgattctcctgcctcagcctcccaagtagctgggattacaggcgtgcaccaccatgctcggctaatttttctatttttagtagagacagggtttcaccatattggccaggctgatcttgaactcctgacttcaagtgatccgcccgcctcagcctcccaaagtgctgggatgacaggtgtgagccacagcgccaggccctacaccccagctttctagctggatgtctttgggatggctttggggccaggcgattacacttcctaagcctcagttttgtcggctgaaaaatggggctgaaaatgcgcaatttgcagttgttaccaggctttgaggtgagacgtgtgatgtgctgatcgcaggtagaaagagggtaagtgatacaccaggtacacctggatcaagggaccctgacaggcccagccggcccacaggtcaccccagctcacatgcagggctgcctgctgggccccatggcaacgccacacacagagacatcaaacaggccctgccgaggaagtcccacgtcactgcggttagagtggctcctcccagcccagcccccggctggcggcagtgacccccatgccagtcagggcccctgcctcctgttgccctggcgaccagctgtgttatggactgagccgggatcccaccacatccctgccccctcaccagggcaccagccactccccacatccggagaaggacattacacggtggccccagctcaccgtgacaaactcaattgcctggtgtctggagcaccaggaaagactttgtctacctacataatggttcagaagggcagagaggtcccagggatctgtggggactcccagccaggtgcctgaaatccccggggaagggtcccagtattgctcaagggcactggtggggcaggtcagacaggaatagaccccaggcctggcccagcccccacctcaggaatgactcaccacccacccagctcccgatgacatcaaggcctggcctgccaccctgacctggccccaggccagaactgggggggcgcacccaagaagtgtcacatctggctgtccctgcctggctgggatctggtacgcagagggttaaggagagcccttctgggggtctcccccccatcccatcccccccactttcccggggatttcgggccccagcccctctgacgtcactgggggttgctatggcaactggccgaagttcccaaataaaattaccgcgggcgggttaagtttcctaggaggcagccgacgggtaaacaatggcggtggcaggcggggccggcgagaggccgtctccccctcttacccccgactctgctgggacctgggggtccctggggcgaggggcagggtccccctccctgcccaggatctgagagccctcgagccagcgaggggattggcgcccagatgagggacagcgaggccacgacccacatgagcgggggatggggacgaggggtctttggaggggaggctggggcggcggggaacaaagaggggaccggaggcctggggatccaccctccacacaccctcccccctaaccccgctcccggccggccgccagtccagctgtggctgttcccagctccctggctccccacatctggcgggccgcgcgctcacttcctgtcgccccggctgcctggagggaggtaaaaataacccgccccctccccctgccggcggcgcagacggcggatcctcccagcctggaggagggcgaggccgagcctcagccgggagaggaggccccctgaggccgcctcccgtccctcccagtgcctcgctgtcctggcaggaggggggcaagtaggggtgccacagagcctaggctgcgctgggggactggggaagcgcatcccatgagaaaggcccttagctgggtcaccaggaacccagggaaccatagtgtccaaccacccccaccaatcccgtgggggagggggttcaagttctgagagttgagggactgcagccaacatgcctgggttccaatcgagggtcacccacttcctaacctaacagtataaacaagttaccaaaaaaaaaaaaaagccccccccccgcacacacacgacaagagcaaaactgctccaggcctcagtttacctagctgtaaaatgggcatgatagcagtactcacttcaaagtgcatttgttgggttaggagtgtcaactcactctataatcccaaaactttgggaggctgtggcaggaggatcgcttgaacttaggagtttgagaccagcctaggcaacatagtgagacccccatctctacgaaaaagtgaataagtaaaatgaaaacacataaaaaagaaaaataaagtgcatttattccctgagtgttagctatgatcgtttccccctccccaggggcccctgagacccacccccctccaccaagtacagttcccagatgagacacaggacacccagtgaaacttaatttttcagatacacagcggatctctttttttagtataagtatgtcccatgcaattttggggacatcgctatactaaaaaaaaagttttatactaaaaaaaaattacttgttctgtatctgaaattcaaatttaactgatgtcctgtattttttatttgttaaatctgccaactgtatccttaagtcaccatcatctctggcctaaatatattccaacagccacctccctggtcctctccgactttccttatgccttctagccattctccagagacagcccgttaaatccaatcacgtgtcccctctaccttccacttggaaaagttcctggtgtcccaacctctcccgcaggaaggtcctgcctgttattcgccaactcccgagcatccttcagttcccagggtatcacctcctccgagaagccctcctcaccttcttggctttagactgtccaggatccctgtaactcagccatctccccaactcaaccatttgagtgattgacttggtcatgtgagccaaatggacatttcttacaggactcaaagctggtcacttcccaggcagctggtccatctccgtgtctgagatgctagtatctactcttctccccgccccataggatctggggctccggaaggcccctcaggcagctcccttaagggtcctgtgggcggctcagtggtgactattggggtgccagggagcccggagttcaggccatctgaagctggtgctgggaaactctctccctgcactcagatggcatgggaagtctaggggggtgctggtgcaacctctgtagtgcacagccttcagtatcatgtgtcgacagcccccaaggagcccaccaggcgccatcccccacttgcataacctacccacacttcaatgtagccttggcacctatccccacaacgcctgaagactcccacagatatggccctgccaaggccaggcatgcaccctcctgagacaggtttgggagcccggatgccagcttggctgtgcatcctctggcaaaggacattgaccctctgttgactcagtttccccatctgtaaaatgagaatgtcaatgaaacgtcagagggccatggtgaacactatttttaatttttattattattattttttgagacggagtttcactcttgtcacccaggctggagtgcagtggcacgatcttggcccactgcaacctctgcctcccgggttcaagcgattctcctgcctcggtctcccaagtagctgggattagaggtgctggccatcacgctcggctaatttttgtatttttagtacagacggggtttcaccattttgcccaggctggtcttgaactcctgacatcaagtgatccacgggcttcggcttcctaaagtgctgggattataggcgtgagccgccgcgcccgacttcatggtgaacattacatgagttaatacacataggcccacacatgcatagaacaggcttagaacatagaacgtgctcattaagtgttagctagtttgggaggtcggcaggggtggggaggatgcaaaaaagccctcatcacagcgctcctgacagctcccgccaggccagctccccaaatcccttaggaaaatggcctcgacctctcagctgcaactctggcccagccgccatctcctgacctgaccgcccacttctggggagccccggtgggtctggattggagagagccaccctcagccctccccaccttcattggaccacagctgtctccttcaccatcacctccgtgcccaccaggattacaggcctgatctgaacccctaatctagggaagactacggagtcccaaaatccctcttagcgcgcaccccggcctgaggctcgaacccaggtccgcgctggagggcggtggcggttgccgagcaacgcgctgtttgttggcgcggggggcggggccggggccggcgcgcggtgactcaccgcggcgtgatgcggacgggcgcggcgcccagcagcctggccggcggcccgatctcggctggcctcggcgtccggaggggcccggcggcgggggcgccttagcccccaagtgggcgccggaggcccgtggggaagcggcggagcaggtcccgggctctcggactcggttcgaatcccagccctgcctcttactcttgactcttgatctgtgacttcaaggctccttgcctcagtttacccgtcagtaaaagaagcgacactggagggtgcagtaacccaccactggcatttaaagcagctgagatgatcacgcagtgacactgcggggcagcaagtttgggacacccagattctgcacgtgaatctcctgtgttaaactctgcaacctcacggagaatcaatttccgcatctgttacagggcagtagcaagaacaaacaccctgcctctcgggtggtttgagaatcccgtgaattcatagtgagacaatgcgtggcacatttcagtaccatgtctgctgccccacggagggacgggatgtaggaggttttctctgtggtccgagctcaggagggcaaggaggtgagggcaagactggaacccctagaagtgggtggcaagtcacaggtccagggcagggtggcatgaccatggctgcagaggcccctatcccgaagctggctcacagcacctgctgcgggcaggcagaaggggggcctgggggtgagtcaccgcccagcaatgaggcttgagtcacacagggcggggtcccccgttagcccccccagctgctcccacaaaggccctttgagaagagttccccaccccctactcccaccccctaggccctctctaggggtgggctgtggggccgaggccctgctgggctgcccccaggagcccggcctgggtctgggaggcgccagccagtttcagccatgtctgtgaaaagtcaccataggaagctgggtgtcccccggggagggggcttccaggctgcctgagtcactggaatggtggagggtcacacgcgcagggcccacgcacacagcgggcaaattgagtcagactgtctggtggggcgggcaggccaggacgcttcgagtcaggctgagaaggaaacctgggaagagacatggttcttccaagcctgtggcctctggcagagaaagagggtgcttgagggcacatatggtgggtttcaccacacctcctgcctaggcctcccctccttgcctgccccgaaacagtctcccccacctttctatccttcttaaacttggagtgagaaggacagcaagctggatgggattccagggaggcactctactagcggaagaattgagatttttttttttaattttattatttatttatttatatttatttacttttttttttgagactgagtctcaccctgtcacccaggctggagtgcagtagcacaatctcggctcactgcaacctctgcctcccaggttcaagcgattctcctgcttcagcctcccaagtagctgggactacgagcacacgccaccatgcccaactaatttttgtagttttagtagagatggggtttcaccatgttggccagggcagtctcgaactcctgacctcaggtgatccgcctgccttggcctcccaaagtgctgggattaaaggcgtgagctactgcgcctggccaatttgtatttatttatgtattgagacagggtctcattgtgtcgcccaggctggagtgcagtggcacaatcacgtcttactgcagcctcgacctcctgaactcagctgagcctcccacctcagcctcccaagtagctgggaccacaggtgagagcgaccacacccagctaatttttgtatttttttttttttttttgtagagacagggttatgctgtgttgcccaggcgggtctggaattcctgactcgaattcctgccctcaagagttccgcccaccttagcctcctaaagtgctgggattacaggcatgagcccctgggccctgacctgtttgtttattttttagagataggggtgtctccatgttgccctggctggcctcaaactcctgggtttaagggatcctcccgagtagctgggaatacaggcaaatatgtccacacccagctttaagataaaaaaaaattattattatttaatatttatttatttattgagatggagtctctgtcacccaggctggagtgcagtggcgcgatctcggctcactgcagcctccacctcccaggttaaagcgattctcctgcctcagcctctgaagtagctgagactacaggcgtgtgccaccatgcctggctaattttttgtattttttaagtagagacggggtttcgccatgttagctaggatggtctcgatctcctgacctggtgatccacctgcctcggcctcccaaagtgctgggattacaggcgtgagccaccacgcccagcccaggatcaaaattttttaagacaaggtctcaccactgccatctcaagctccggggctcaaaggatccttctacctcaacctccagagtagctggaactacaggtgagcaccaccacacctggctaatttatttatcttgtgggggtcggggcgtgagggtcttgctgtgttgcctagactggtctccaactcctggccttaagtgagcctcctgcctcagcctcccaagtagctaggactacaggcatgtgcaagcacacccagcttatttatacacatttattttattttattttattttatttttttttagagacagggtcttactatgtttcccaggctggtcttgaattcctggtctcaaccaatcctcctcctgcattggtctcccaaagtgctggtattacaggcatgagccacctcggctgaccactttgctttttctatttgttgactgagatggctataaagggactaacagactggtagcctatacagacagcatggataagctgggtaaagggatgattcacatcccaggactgtgggagatttcatcacactactcagaacggcctggaatgtgaaggtatgacttgttttatttctggaattttctttcttttttttttttctgagaccgagtctcgctctgtcacccaggctggagtgcagtggtgtgatctctgctcattgcaacctctgcctaccgtgttcaggccattcacctgcctcagcctcccgagtagctgggattacaggcgcgtgccaccacgcccggttaatttttgtatttttagtagaggcggggtttcaccatgttggccaggctggtctcgaactcctgacgtcaggtgatccgcctgcctcggccccccaaaatgctgggattaaaggcgtgagccacctcgcccagcctctggaattttccatttaatatttttggaccaaagttgaccaaggataactgaaaccgaggaaatcgaaactgcagataagggggacgactgtatacagtcaaatgtgtttagaatattcatagacttatgcaaccatcaccacaataaattttagaacattcctttttttttggagacagagtctcactctgtcacccaggcaggagtgcagtggtgtgatctcggctcactgcaacctccgcctcccaggttcaagcgattctcctgcctcagcctcccaagtagctgggattacaggcgagcaccaccacgcccagctaatttttgtatttttagtagagacagggtttcaccatgttggccagactggtctcgaactcctgacctagtaatctgcccgccttggcctccggaagtgctgggattacaggcgtgagccactgtgcctggtccacaccagctaattttttgtattttagtagagatgaggtttcaccgtgttgcccagcctagtctccaactcctgagctcaggcaatccgcctgcatcagccttccaaaattctgggattagaggcaggagccactacgcccggccttttttttcgctgaggcaggatcttactgtgtagcccagagtggagtgcagtggcggcatcctggctcattgcaaccactgcctcccgggctcaagcaatcctcccacctcagcctttggaatagctgagactgcaggcgcccgccaccacgcccagctaattttttttttttttttttttttttttttgagacggagtctacctctgtcgcccaggctgcagtgcagtggcgccatctctgctcactgcaagctccgcctcccgggttcacgccattctcctgcctcagccttccgagtagctgggactacaggcgcccgttaccacgcctggctaattttttgtatttttagtggagacggggtttcaccgtgttagccaggatggtctcaatctcctgacctcgtgatccgcaagattacaggcgtgagccaccgcgcctggccatttttttttttttttttttttaaagacagggcgttgctatgttgctcaggctgttctcaaacacctgggctcaagcagtcctcccacatcggccttccaaagtgctgggattacagcatgagtgaccacgccctgcccaactttagaacatttccatcacccgcaaaagaaatctcaagcccattagaaatcattttctggccgggtgtggtggctcacgcctgtaaccccagcactttgggaggccaaggcaggtggatcacctgaggtcaggagttcgagaccagcctggccaacacggtgaaaccccgtctctactaacaatacaaaaattagtcaggtatggtggcacatgcctgtagtcccagctattcgggaggctgagttgggagaatcacttgaacccgggaggcagaggttgcagtgagccgagatcatgccactgcactccatcctgggtgacagagcgagactctgtctcaaaaaaagaaaggaaagaaaggaaggaaaggaaagaaaaggaaaagagaagagaaaagaaatcactttctatttcaccccccaacattctcagcctctggcaaccctggtctactttttgtctctgagtataaatgctgtcaacagagttcatccatgttataacaagtgtaacaagcgtgagtaccttattcctttttattgccaaataatatgtgatacgggctgggtgtggtggcccatgcctgtaatcccagtactttgggaggctgaggtgggaggatcacttcacctcaggagcttgagaccagcctgggcaatgtagtgaaaccctatccctacaaaaattacaaaaattagctgggcatggtggtcctcgcctgtagtcccagctactcaggacactggggcaagaggatcacttgagcccaggaggtcgaggctgcaatgggctaggattcttttactgtactccagcctgggcaacagagtgagactttgtttctaaaatgacgagacctcgtttctaaaataaaaatgaggctgggcggggtggctcatgcctgtgatcccaacactttaggaggctgaggcaggtggatgacttgagctcagtagttcaagaccagccgggccaacatggtgaaacctgtctctactaaaaatacaaaaattagccaggcatggtggcgggcacctttaataccagctacttgggaggctgaggcaggagaatcgcttgaacgtgggaggcccaggttgcagtgagccgagattgcaccattgcactccagcctgggcaacagagcaagacttcgtctcaaaaaaaaaaaaaaaaaaaaaaaaagctgggcgtggtggcacgtgcctgtaatcccagctactccggaggctgaggcaggagaatctcttgaacccgggaggcagaggttgcagtgagccgagatcacgccactgcactccagcctgggcgacacagtgagactctgtctcaaaaataaataaataaataaataaatataaaataaaaatgaaaataaaatagaccaaagctatgtcccaggaacaaagtatttgagaagcagatgctgtctcacaaagaagactgagacagagaagggatgtcaggaggatctagtgtcccaaggccaaggaggaaccaggcaaaggtgacagatactacacggagctcaaggacagctacagctgagaacttggcctgactctgaagtctgatatcagtagtgtgatcaggcagccgcctgataagtaaatgggagggaaggcaataaaggcagtgtctaaagaaatatattgtgagccacaaatgcaagccacatatgtaatgaaaacttttttagtagccacatttttttaaaaaagtagcaggtgaaattaattttattttattcacatttatttatttatttttgagacacagtatcactctgtcacgcagaatggagtgcagtggtaggatctcggctcactgtaacctctgcctcccaggttcaagtgattctcctgcctcagcttcccaagtagttgggattacaggtgcgtgccaccacacccagccaattttatatttttagtagagacggggttttgccatgttggccaggctggttttgaactcctgaccacaagtgatccacctgcctcagcctcccaaagtgctgggattgcgggcataaactagtgagcctgccaaaattaattttttttttttgagacggagtcttgctctgttgcccaggctggagcgcagtggcacgatcttggctcactgcaacctctgcctcccgggtttaagtgattctcctgcctcagcctcccaagcagtcaggattacaggtgtatgtcaccatgcccagccaattttatatttttagtagagacggggtttcgccatgttggccaggctggttttgaactcctgacctcaagtgatctgcctgcctcagcctcctaaagtgctgggattacaggcatgagccagtgagcctgccagaattatttttttttttaatttgagacggagtcttgtcctgttgcccaggctggagtgcagtggcatggtctcagctcattgcaacctccacttcctgggttcaagtgattttcctgcctcagcctccaagtagctgggattgcaggtgcctgccaccacacctggctaatttttgtatttttagtagagacggagtttcaccatgttggccaggctggtcttgaactcctgacctcaggtgatccacccgcctcggcctcccaaagtgctgggattacaggtgtgagttactacacttggctacaaaattaattttaataagattttatttaactgagtatatccaaaatagtatccttttaacatataatcaaggtaaatattatgaatgagatatttcagttttttggtactgtcttcaaaaatctgatgtggattttatacttataacatctcaattcaaactgttaggttggtgcaaagtaattgtggttcttgccatcattactttctttctttcttttctttttttttttttttgagacggagtctcaccctgtcccccaggctggagtgcagtggtgcgatctcagctaatgcaagctccgcctcccaggttcacgccattctcctgcctcagcctcccgagtagctgggactacaggcacccgccactacacctggctattttttttgtatttttagtagagacggggtttcaccgtgttaggatggtctcgatctcctgaccttgtgatccacccgcctcagcctcccaaagtgctgggattacaggcataagccaccgcgcctgctttttttttttttttttttttttttgaggaagagtcttgctctgttgccaggctggagtgcagtggcacagtctcggttcactgcaacctctgcctcccgggttcaagcgattctcctgcctcagcctcccgagtagctgggattacaggcatgcaccaccacacctggctaatttttgtgtttttagtagagacggggttgcaccatgatggccaggctggtctcaaactcctgacctcaggtatccaccctcctcggcctcccaaagtgctgggattacaggcgtgagccactgcacccggctgccattacttcgaagaatagctgtatttcaggtgctcagtagccacgtgaccagtagtaacgtcattggaaaatgcagtccagacaggcccgagtcctgcccttgtgtgactcatgtcactcacctatccctaatcccagctctgttggatcctatctttattgaaaaaaacaattttttttttctagacagggtggaatgcagtggtgtgatcatggctcactgcagcctccacctctggagctcaaccagtcctctcacttctgcctctgaatagctgggaccacaagcgtacaccaccacgcccagctaatttttaaaatttttgtagaggccgggtgcggtggctcatacctataatcccagcacttcgggaggccaaggcgagcggatcacttgaggtcaagagtttgagaccagcctagccaacatggcaaaaccccatttctactaaaaatacaaaaattagctgagcatggtggcgggcgcctgtaatcccagctactctggaggctgaggcacgagaatcgcttaaacctgggagagatgattgcaataagccgagatcatgccactgcactccagcctgggcaacagagtgagactccgtctcaaaaaacaaaacaaaataaaataaaataataaaacccttgattgggcatggtggctcatgcttgtaatcccaagactttgggaggctgaggagggtggatcatttgagcccagtagtttgagaccagcctgagcaacatagtgagacactgtcactacaaaaaaatttaaaaattagccaggtgtggtggtgtgtgccagtagtcccagctagttgggaggctggggcaggagaattgccgaaacccaggttgaggcctcaatgggctaggagtgtgctactgaactccagcctgggcaacacagcaagatcccgtttctaaaaaacaaatcaaacaaacaaaaatccctaagccttctcatcatacttaaatccaaactccttactgatcaaggacctataagacgtcacctcctcaaaagccttcccagattgcactttcatcttccaggctgggccttgactctcagcactgaaaactcttcattgtaattggctagctacatgactagccccctgccagatggtggcaggcaagctcctagtctgttttgtccctcccccacttcccatcatctcaccccacatgcatgccaggaacatagtgattattaatgcattaattcactagatattgactaagggccttttttaagttctccagcagtgatgaagacaaacgttgtaggctgggcacggtggctcatacctgtcatcccagcactttgggagactgaggcaggaggatcgcttgagcccaggagttcgagactgccctgggcaacaaagtgagacccacccccatctctccaaaaaaaaaaaaaaaaaaaaaaaagacaacagctattgtgctggcagagctgacaatcaagtacaggagacagacaagaaacaagatgtgtagtaaaacatgtagtgtgttgaaaggtgacagggccaggcgcggtggctcacgcctgtaatcccagcactttgggaggccgaggcaggcggatcacgaggtcaagagtttgagaccagcctggccaacatagtgaaaccccgtctctactaaaaatacaaaaaattagccgggcatggtggtggcacctgtaatcccagcgacttgggaggctgaggcaggagaatggcttgaacccgggagcggaggttgcagtgagccgagatcgcgccattgcacttcagcctgggcgacagcgagactccatctcaaaaaaaaaaaaaaaaaaaaaaaaaggtgacagggttgtgagaaataaatagaggagaaagcaaggtgggtgcaattttgaaataggggagtcggccgggctccatctgtaattccagcactttgggaggctgaggtgggcggattgcctgagctcaggagtttgagaccagcctgggtaacatggtgaaaccctgtctctactaaaaatacaaaaaaaattagctgggtgtcgtggtggttgcctgtaatcccagctgaggaggtctggaatggggtgaatgagggagggagtggagagggtgaggcagagaggagacaggagactgtgcaaagccttctgggtcctggggaggactttggcttttgctctgaataaggtgggagccattgagggttctgagcagaggagggactggacctgacttgggtgctcacaggcgccccgccccggctgctgtggtggggaggggattagggggatggggacagactgtcgggggctgcaaggtgtgcagagaggtggcaactggagcaattctggggagagatgatggaagccggaccagggtgggccttggagaagtcaggattctggatgcattagaagggacagtaactagcctgggagcagtggctcatgcctgtaatcccagcactttaagaggccaagacgggtggattgcttgagtctaggagttcgagaccagcctgggcaacatagcaagacctatctctactaaaaatacaaaaaaatcagccaggcgtggtggcaggtgcctgttgccccaactatttgggaggctgaaagaaatgggaggatggcttgaatccgggaggcggaggatacagtgagcagagatcgtgccactgtactccagcctgggcgatagagccagaccctgtttcagaagaaaaaaaaaaaaaggacagtaagcaaaattgttaatgggttgcatctgttaataaaagtttttgtctgagcagctgggaggatggagctgccatttccggagaccgggaagatggcgggagaccgtttgcagttgaggaaatgagctctgagcccagggcttcgttctggccctgaagtgtccctgcccagactctggtggggtgcggaggaaagcacccacatggcctaggctttgcctcctcggggctttctctcggtcgatgcctgagtgtgcaaactacacccacatctgagtatacaggggcacctccgaagacccccacggcctgacacatccacccagtgtccaatggccacagccttgggggacttcgggggctggagttccgggctgatggagttgagaagggctgcctggctcttacacccaccttgggtccccacggagacccccaaggggacaggaggtgaaatctcccagggagaggttcaggaagagctgctgctgtgtcgcagccctgggctccccctatgagtcagcactggcaggggccccaggaactggggaccgggggtgtgtaggggggagggcagttcccacgccctaaggcgtctggggcgctggggcttcccccaccgctcctcccatcctgtgctgggctctggggatcttcagaggagtctggggggtgagaagcccagggcggattggccactgggccaggatccaggaatcctctctcctggtctgacccagttcaggaatgcagaggccgcccgccccggcaaatgcgttgcagcaagaaggagagttagacgtagagaaacaccgagtgagttggacatttgtgtggacggcacttctagggggctttatttaagaaggggcccttccttctggggactctgcatttgagcagtggaggctccagcctggggtgtccaggcagagtcctcagctaccgtggagtgggaggtggcggggaggagggggaggagactgcgctgagagctgagatcagtcccgccggcctccacagctgggagggcgctggactctgctgccccctgctggtggctgcaggaaattcagcgagcaggacagctggccggtcctggagaagagacggggggaaaggcctcgcacagaaagaattccagctctgccttttttttttcttttttctttttttttgagacggagtctcgctctgtggcccaggctggagtgcagtggcacaatctcggctcactgcaacctccgcctcccgggttcaagtgattctcatgctttagcttcctgagtagctgggattataggcgcgtgccaccacgcccggctaatttttgtgtttttagtagagaagagatttcaccatgttggtcaggctggtctcgaactcctgacctcgtgatccgcccgcctcggcctcccaaaatgctgtgattacaggtgtgagccaccacgcctggccccagccctgcctcttacaggcggtaccaccttgggcaagggcaggccccatctgggcctcggttgcccatctgtggaaagggcagtattcacttcattggcctgctgggaagaatctgagatgatgataggcattcctgggaccaggaagaaggttcgaagatacagctggggagaactctaccctgggcccacccttctaaagagaatagtccctgcctcaagggttgctctggtctggatgggagacgaggctcatacacgtctatgagtggatgaatgagtgaatgaataaatgtgaatgttgcatattccaaagcaagtccctccccaaccccttccgcctctttttctaagagaggaactctttccccaatacgctcttttttttagagatgaagtctctgtctgttgcacaggctggagtacagtggcaccatcatagctcattgtagccttgaactcctgggctcaacggatccttttgcttcagcctcccaagtagctgggactataggcgctcaccaccacacccagctaattttttttttaattttatttttgtagagacagtgtctcgctgtgttgcccagactggtcttgaactcctggcctcaagcgattctcctgcctcggcctcccaaagtgctgggattacaggcttgagccactgtgcccggccccccttgcctcttttctgtaagaagggctggccggcaggggggcgggcggcacaggagggccatcaacagagctgactggccccccccaaccccatggaggtatgattactagattgcaatgaactcccattctctcccctgcacgtgtctctccatccccactctgggagaagacttcctttgggagaggttaggtgtagactacagctggcccctctaacctttggtggggttgggggtcgggggagtggtcctggagacatccactctcctggacctggaaccagactttctgggctgagacctgaaggcagctggacgatgtgggagggtgaacctgtcaaggagaaactgaggcaggactgtggtggaggaggctgaaaggaagtgaggggtgcgcgatcaggtggggaagggccatggccccataagggttaaggtctgggcttggaagggggccagtcaaaggtttctccatccccctctcagactggggtgggggataaataaacagaatgagaaatctgtcagctcagcccgggccaatgggaggctgcctggcgccatggtttgccctgatgtgaccttcctctaccagccgcggtggccactgcgggcaggggcagtgtgtggagcctcagccagggtacgatcattccagccttgtgcatgctcttatacctgggcagggggaggggggatgtctggggaggagtaccgtctgtgcaaggatctttgggagatccggggagccccatcctttgtacagcttgcatgtggtctgtgcacctggcctgtatatatgcttgtgcctcatggtcccaggtacacatccccacgtgcccctgaattgcgtgtgtccatgtggacccctgtggctctgggacctgctgggggtcttgtgcatgtggctgttggctgtgtttctctgcctctgcgactggtccatttgacccgagtggctgtgcatatatgtgtgtgtctgtgaactttgtggatctgtgtctccatgggtgtgttctggttctatgtctatatccatgtattaggttattttgtgtgtgtcacggtgctcctgtggctgtgtacctggggtactgtgtgtgtatgttggggggtatatctcaggtctgtggataccccagtgcgtctgtgatctcctgcgtgtccgtgtgtcttgtgtgagctgtgcgtgcccggggttcagccgcgtttctgcatatttcggttctaaggaccttccctcctgtcctgaatgtggtgtgtctgtgtaccttgcatgtgtctggtgcccccgggtgtccctctgtgtgtagctgggttttatgaccaccctcgtgcggcccggcacgcccgcacgtcccgccaccccctcccttgggtgtgtgtctcgcagccccctgcacaccgttccctatgtctgtggcccgcgtgcctttgtgcgcgtgtgctccccccggcgcctttgaggtctgcgtgcgtctgggtccctgcgtgtgcccgcccgcgcccccgtgtccctgattcccccgcgcgggccccgggagctgcgttttggagacccacgggcatcccccgagtgcgtcccggtgcgcctggcaggaggcctcgggacgcgcacggccgcggctggacccaccgcccggcgcggcgcggggaggagggagggggcggcggcagcggggagcgcgggcacgtcaccgagacagacaggcgggcgggcggcggcggccacgggttcgagccggcgccggagccccgcggccccctccccccccccgcccacggcctagggagcccccgccctgccccggagccgccgaaatgcaatttcccgtgcaggcgcctcgggcccggggggcttttccgggcgggttttggaaagaagagggggaaatgcggcggcggccccaatcgaggtgagcgcgggcgccgggcgggccgggggcacgggcggggcgggggccgcccgcgggcagggggcgcggcggggcggggcgggacgcggccgcagccccctcgcgcacctgctcgcagccccggggcgggcgccccggcctctgcggcccggccctccattgttgttggggcttggaaggggggcggggaggccccggcggcatctctgcgtctcgcctttccggagagggggcgccgggagggtcggactctgcaaaggggacagacccccgagtcccggagccggggccgccagggggagggcaagcggagatgccctcgcggggcggggacgcgcgatggggggcgtggggacagcggcgccccgaccgcccgacacctgaccgcgcgcggggaggccacgggccggggcggcggcgagctttgttcttgggggcgcggggcgggtggggcgctcggaaatcgaatgccagaagagagtacggcccggcgcgcgcgcgttcgtgaaggctgctccggccaagttcatgggcgctcgggcctgcggagaccgatcctggcgggggccccgctcaggcctggccgcgggctgggggtgctgcagccgcgccacctccggaagccctggcgccctgcgcgggccgcccctccggcctgtcattaccggcagcagctgcagggtatttactggggccaaggtttgcgaacaggaacccgccctccaaaactggccataaaaagggaaaatggccccgaatcccactgccggggagcccttttaaagctacagggcgcctttcacggcgacctgccctggagggcaggctgggggtgggggggtggaaaagacacctcattggctgatagggactgagacgtcccccccacggtcccacacttcggttcccctccccccatctctttccctacccattccacacccctggactgctcacagatgcattaagccagccacgattagatattcccaaggccctgatggagacccccaaaattacacgctatacacagacatacagcaccccgattaatacgcagtcgaaagtgatgctgacacacacatacagtccccacaataacactgccacgtgtgtagacacgtcacccacaagggctcggacatccagggatagtgcccattgaaaggctgtcacacagaaatggagccaccaacgaaggcagctacaacatagacacagcctttcgcataacactgacacacagaagtgggtgttcacccacagcatgtcactcagggtagcaatgacaaacgcagatccctaaagcccatcagtcaggcacacacagactccgactccatcgttcacaatacctgggacacacacagacatccatgtgtcctcccaaccaagttcacacctgcacactcacagtcacccacagtcacccccaccacacacacacacatacacacacacacagacggtacaaggcctgcagaaacacatctgacagcaggtcacacataatcttttttatttttatttacttatttattttgagatggagtctctcttggctgcccaggttggaatgccgtggcacgatctcccggattcaagcaattctcttgcctcagcctcctgagtagctgggattacaggcgcgtgccaccacaccaggctaatttttgtatttttagtagagatggggtttcaccatgttggccaggctggtcttgaactcctgacctcaggggatccgctggcttcagcctcccaaagtgctgggattacaggtgtgaaccgccgcacccggccacagtttcctttttatttttttgagacagggtctcactctgctgcctaggctggagtgcagtggcacgatctaggctcactgcaatctaggctcactgcaatctaggcccatctcctgggctcaagcaatcctcccacctcagcttcccgagtagctgggagaacaggtgcgcaccaccacacctgggtaatttttgtattttttgtagagatggagttttgccggttgcccaggctcgtctcaaactcgttgagctctagctatccacccacctcggcttcccagagcgccgagccaccatgcctggcccaaatttttgtttgtttgttttgttttttgagacagggtctggctctgtcacccagactggagttcagtggcacgatcatagctcacagcagcctcaaactctcagactcaaatgatcctcccacattagcctcccgagtagcaggtctcagtaatcttgatatacacacacatacagaccacccccgcccaagaacacaactgcacacatggacacacagttgttcacagtaaaatggatcctcttagccacccacaaagacactgtcacccacaaagatatatgagcacgaacccagtggccatatgcccatcgtcacctaccctgagacttgtttaggcactcagacacctgcacatctacaataatactgacatacacacagacacagtaacacatgcatacacactggcatgcatagactcacggggaaatgacacacaggcaggcagaaatcctgtcatctggatgcccacaaacccaataatatttttttttttttggagacagagtcttgctctgtcacccaggctggagtgctctgtcacccaggctggagtgcagtgacacaatctcagctcactgcaatctccaactcccaggttcaagcgattctcctgcctcagcctctcgagtagctgggattacaggcgcccgctaccatgcctggctaatttttgtatttttaatagagacagagtttcacaatgttgtccaggctagtcttgaactcctgatctcaggtgatccacccacctcggtctcccaaagtgccgagattacaggtgtgagccagtgcgtccggccccaatactcatttattgagcatctgttatgtacccagcactgttctagcactggggatgcagctgtgaacaagagggaaatctgaacgagcacagtggttcacgcctgtaatctcagcactttgggaggccgaggtggcaggatcacttgagatgaggagtttaaaaaacatattagctgggcgtggtggtgtgcgcctatagtctcaggtactagggaggctgaggcgggaggatcgctttgagcccaggagtttgagattgcagtgagctatgatggcaccactgcactctagcctgggtgacagcgagacctagtctcttttaaaaaaaaaaaaaagaatgaaatccctgtcttcccacacctgacattttagtggggaatgggatgggggggacaccatgactggatgatacagactccagtcactcatagtgacaccagcagacaccagacacccacgcacactggctcacatgtcgacctggaattacacacaattagcctgatatacacccacagcaatgctgacatccacacacaaacagaagcccacaggaacttacacacacacgcacacacacagctggtggagagacagccacctgctatagcacactcccacctggacttacagacacccacagaaccccccaaaatacctcagcaaagtagcttggacctgaagcccctatttatagacccatagaaacatcctacaagagttcttgagacggagcccaccctgaccccaaacccagggtcacccagcaccataagcctcagtagaagtgtctgaatttcccttattaaaaaatttttttaatttgttttttgtagagatgaggtctcactgcgttgcccaggctgatcttgaactcctgggctcaagtgatcctcctgcctcggcctcccaaagcgttgggactacgggcatgagccaccgtgcccggcctgaattctccttcagcttggcccctccatagcccccaatcccattcctggagaagccagaaccttctcgccttccccagccctggcctcacatctggcaggcctgggaaggaagctgggctcctagcccacccaccgcccacgggctgggtgggacagaggagccccttgtctgaggacccctggcatgaaagactcccgcagctggaaaggaagtgggggaggtggcctgcggagggtggggtgggaacctcagagcccacgcaggtatcactgaaacgagacacccctgcttgccagtctagacagcctgggccatcaccgtgaccccacggagacccccacagggctcttggtgtcgctggaacccccataatgggctctttgtctgccaggtcctgacgacctcccccaccccgtgtcccccttccaggcccaagtacacacacacacacacgcacgcacacacacacacacacgcacacacatacagttacatacaacacacagacacacaggagcatatatataggtactcatgcgtgaacatacagagacacccccaacccccatgcaccaaggctcagggttgagatcgagaggagacagcttgccacctcccaccctgagggacttcacagtcaagacttcaagaatcacgggcaggacacacgggccgccagacacccctgggagcttggagacctggccttctagccatgcccaccttgttcttcaactatttttttttttttgagacagggtctcactcctgtagcctgggctggagtgcagtggcgtgactgcgtctcactcactgcagcctcgacttccctggcttccgtcagcctcgacttccctggcttgcgtgatcctcccacctcagcctcccaaatagctgggactacaggcgcacaccaccacacccggctaagtttttctatttttagttgagccagggtttcaccatgttgctcaggctggtcttgaactcctgtgctcagtcagtcttcctgctttggcctcccaaagcagtgggatgacgggcatgagccacccggcgcccagccttgttcttcagcttgacggtagagctgcctccatccatccatccatccatcacttgctcacctgcctctgctaggacttctcacctccgactctgatcccccgacttgtgccagctgccctgcaccttcctggtgctatgtgtgggggggtgggggcaaggccctgggatagcgtggctttttttttttttttttttttttttgagacggagtctcactctgtcactcaggctggagtgcagtggctcaatctcggctcactgcaatctctgcctcccaggttcaagcaattctcgtgcctcagcctcccaagtagctgggactacaggtgtgcgccaccatgcctggctactttttttttgtttgtttgtatttttagtagagatggggtttcaccatgttggttaggctggtctcgaactcctgacctcaactgatctgcccgcctcggcctcccaaagtgctgggattacaggaatgagccaccgtgcccggctcataacgtggcttttagagggccgtcccccacaccccacttatccccagctcccctgcccagaaagaccctcccagctgcactggggtcaggtgaggggtcccaggaactaaggataaagaagaagcaaaatgaaggccctgaaagacacccctaccccccatgcactgaggctcagggtcacaagcaggaggagacagcttgtcacctcccactctgagggacttcaaagtcaaaccagcagacagctgcaaccagacaagcagggcagggctgcagactccctcaggggacaggaggggacaggtatcacggtcaccagtcacagacaggagatggagatggggggtaaacagctagacacatacaggcagatccagacagtttgaggcaggtgcacgggctgggcaggagacccagatggagaacagatgtgtgaggggcatagtccgacccagacagacgaccctgggatgaccaagagacaggtggacccagatggacactgagggccagaagcctgcacggaccacaggcaaagaagagagatagtcagacccaggattggggctgccggcctcctgtcgccccagccccagcttcctggccttcaagaccagacccctcttccactgtggtcttgtgtcttgtcttagggagaaaccttacagggaacaacctccttggcagttcaaggccaaagccctcagagggaggagtgggaggcagaaaggacacacaggaggtgtctggggaaccccctccaacatagccagaatgtctcctgcctgatgaccccccgcccccaacattaaagctgttcacagtcatcaagaagaaagattcctgtgggacgaggtggctcatgcctgtaatcccagaactttgggaggcccaggagttcgcgaccagcctgggcaacatagtgagatctcatctctacaaaacttttttttatttgtttgtttttgttttaagttagccaggccaggcacctgtgatcccagctacttgggaagctaaggtgggaggattggttggggctgggaggtcgaggctgcagtgagctgtgattgcgccactgcactccagcctgggcaacagagcgagaccccgtctcaaaacaaaacaaaacaaaacaacaacagcaacaaaaaagagaataaagatttttcttttttaaagaaacggggttttaaagaaccactgctgggtgccgtggttcatgcctgtaatcccagcactttgggaggcccaggagttggagaccaacctggccaacatagtgaaaccctgtctctactcaaaatacaaaaattagctggccatagtggcaggtgcctgtagtcccagctactcaggaggctgaggcaggagaactgcttgaacccaggaggtggaaattgcagtgggcagagatcgcgccactgcactccagcctgggtgacagagcaagactccatctcaaaaaaaaaaaaaaaaagagagagagagagagatgggggtctcactgtgttttccaggctagtctcaacttctgggctccagccatcctcctgcctcccaactagctgggactacagacaagaaccaagcttttgaggaatcttgagagttctggactaacagagccacttaccttcccagtccacaaaatgggtatatcctgctcacagcgtgatgaatgtagcgttatcatcagtaatgtaattattaacacctgtgctcccaactcactctccttcccaagtcctaggcgttctcctccttagaatgatgatccacaaggcaggggaccggccacctccctcggaagggcctggacacctggggtggaggtggcggataaagagaagccgatcaggcccccccactccacagcctgaatgggaggatctgctggacgtggcggatgagctgcgagagagggcgccccactccagctccagacagaggggtgggaacgtgaccccgacccggggcgggtgagagggcgggctctggggaaagggctctagaaggtgccgggaggcgggaggggggcttcgggagggcgagttagccgggatcgggcttgaggggccctacgaaattcggtttgggggcgtgcccggtcggggcggaccttagtggggggttgggcttcgtgggggcaggacgcagtcccggggcgtctatagagcaggcttttgtggagggctctaagggggcgggccctaagggagctgggctctttgaggactggcttaggggtttggcggtgggctccgtgggagtctatatgggcgggttttagagggagtgtgttctggggaacaggtcaaaagcgacggggctctaaggggcagggcctgggctggggccttggctggtggctccagactgtgggtggggctctcgggggcggggctctcgggggcgcgtcctcgggggctcggccgggttccgttgccaccaccgtgaggggtgtggtgggggggtggttcacgcagctcggcacacttgggggtccctcatctaccttggggttatgccaggcggttattttgggcctcagtattcccctcggtgaaatgccaggggccaggaaattacttatttttttgcgacgacggggtctcgtcctgtgacccaggctggaatacagtggcgcgatcacggctcactgcagcctcgagcctcgaactcttggggtccaagcgatcctcccatctcagcctcctaagtagctaagactacaggctcactacaccacacccagctaatttttttgtagggacaggtatctcgctatgttgctcaggttggtctccatctcctgggctcaaaagatcctcccgcctcagcctcccaaaatactgaattacaggcctgagccgcagcacccggccatgccgggtgcaccttcctaggccgtccgcagacccaggtcaggggcgaaggcgcgctcgcccatccctggtcgtcactgcttggcttgcggggggtgggagataggggtgcgtacctgtaggcctgggggcacccggggcgggggggtggtcgccgaactctgtgcgatcactggaggaagggactgggggtcatttgagggatgaggaaatggagagggggcgccgcagccggttttgaggcccaaggggcagcccccacgtggctgcgcggactccctccggaagtgcccgagttcagatgctgtgtgaccgcgcacgcggggcgagcggcgccctctctgaacctcctgcctctcccctgtctagtggggccccagtgcacttgtaaagtggagagacctgacgaccccccacccccaagcgctccactcacgctgttgtgattcctaaaccatcgtgcccggaactcagtgaagctcccagaacgtattacattgtattaaaatggcttgtttatctccacgttgcatcaatgccctcggggccaggatcctccgttgccagacttcccgggaacacttggaatgcctcctccacctcggactagcagtggcctttggcctcagtctccccagttgacaaaggggggtaatctgcacctccaggatcactttgtgaattacttaaggagcgggcttgaggccagcactcccctgcactgctacatctccatccccatagcaaaggctacattttatttactagcatttatatttgccttgtgtttttcccagatctaggtgcaaacagcacctgaaaagcgtttgtttatttcatgagagaaaaggggttccttactctctcctcctctccctcttcatgctctctggttccctgccacctaccccacccccgactccaggtcccggaaaatttgccaagggtttgggggaacattcaacctgtcggtgagtttgggcagctcaggcaaaccatcgaccgttgagtggaccctgaggcctggaattgccatcctcctgccggtgactctgaccttccagatctaggggggcctggggagcccccaatccagcctgggcacgtcccctcccctaggccacagccgaggtcacaatcaacattcattgttgtcggtgggttgtgaggactgaggccagacccaccgggggatgaatgtcactgtggctgggccagacacggcttaaggggaatggggactggggacaggaccccccaccgccacagtcactcagcctgttttttgccctgaccccaaccactcctctttggagaggagagctggtgtctggaatctggatgggctctggctggatttgggactaaatattagagggttgggggtaaacaggctggggcagggcagctaaaatccccttttttttttttttttaagacagagtctcactctgttgcctaggctggagtgcagtggcccaatctcagctcactgcaacctctgcctccagggtttgagtgattctctggcctcagcctcccaagtagctgggattacaggcatctgccaccacagtgggctaatttttgtatttttagtagagacgagatttcactgtgttggccaggctggtctcaaactcctgacctcaagtaatcctcccccctcggcctcccaaagtgctgggattacaggcatgagccactttgcctggcctaaaacccctttctgaaatgtgggtggtaagttctgctccgtggagtgctccatagttttgttttttaaattagagacaggatctcgctcttgtcacccaggctggagtgcaatggtgtgaccttagctcactgcagcctctaataactggagtcaagcgttgatcctcccgcctcagcctccccagtagccggaaccacgggcacgcaccaccacacctagcttatttcgaaaaagtgtttttgtaggaacagggtctcaaaacgttgcccaggctggtctccaactcctaggttcaagcaatcctcctcggcctctcaaaatgagccacagtgcctggccaataaaagtttcttaaatgaatggatgggtggatgagctgtgtaagcggcacagcgtctctcctctgtgtccaagtcctgagcacaccctcccctcctgggactgagctgagatctcatctcggggaggacactgaagacctgtaggtactaggggtcccctcctaacagcccaacttgctatcccccacctcccaactccagagggttctttctcacccctctgcagcccccgccaggaaagggctccctccccagcacctagcctcagggggccccagtaactagaagaaggaggcagatgtggtgctttttgttgttgttgttttgagacagagtcttactctgtttcccaggctggagtgcagtggcttgatcttggctcaccgcaacctctgcctcctgggttcaagcaattcttctgcctcagcctcctgagtagctgggatcacaggcacccgccaccatgcccagctaattttgtgtgtgtgtgtgtgtgtgtgtgtatttttagtagagacagggtttcaccatgttagccaggctggtctcgaactcttgacctcaggtgatccgcctgtcttggcctcccaaactgttgggatgacaggcatgagccaccactccctggcctggtgcatgtctttataaataactggatgggcaggtggcttcacacctcagtttgctcatccattcaatgggggttccactaagacaaccgatgtgaaaactcttggagggagaccagagctgggggccggggggcatgatccttcccccctacccccgcaaccagcccatgagcctgggactaccacactcctttcagagacagctggagcatcagcaacctcccgcctggacacacacacacacaaagaacccaggggcacctggccactcccccgcccaggggaaggaagaaaaagttataaagaagttactaagttaacttctttaagttactggtaactgctagtctttgggggtggggtttccaacccattctccccatcctccagtggggctggagggctaaggactcctacaaggaggggaggcagggtagccccccaattccctggaggtgtgtacggggggctgtggtgcacctcgcaggatgcccccccacacaccctgtgtcctgtagtcccccggcacagccagaggccatacagccctttaggaggagtattagtggggcaccaggcccccctgtgacaataaggaacctcccacagcctgctcctccctcttcacacccccttggaggtaaaaggagggtcggccagcacagactcccaggctccagagaggggaaggaaggggcagcagagaggggtcagaaggagggagcttaagccaggcagggttacttgtctctgtgactccttccgcctggcacatgctgcccagctatggggacctttgacctgtggacagattacctgggtttggcacacctggttagggctctgagtgggaaagagggtcctgaaaccaggctgagcccccagccagagccagagccaatgctggagccggtgtcagccctggagccgatgccagcgccggagtcggtgccagtgccgggacccaaggatcagaagcgcagcctggagtcctcgccagctcccgaacgcctgtgctctttctgcaaacacaacggcgagtcccgggccatctaccagtcccacgtgctgaaggacgaggctggcagggtgctgtgtcccatcctgcgggactacgtgtgtccccagtgcggcgccacacgtgagcgcgcccacacccgacgcttctgcccacttactggccagggctacacctccgtctacagccacaccacccgaaactcggcaggcaagaagctggtccggcctgacaaggcgaagacacaggacacaggccaccgccgaggaggaggaggaggagcaggtgcctgcacaggtggctgggggggacctgtccgagggtagtggctgagcccccctgtgaagtaagattagccccagtacccacctccaagggttaggggaagaccttagagagagcttagaacagcagttgattttatttacgtatttatttatttatcttgagacaggtctctttctgttgctcaggctggagtgcagtggcgccatctcggctcactgcaacctccacctcctggattcaagcgattctcctgccccagcttcctgggtagctgggattataggcgcgcgccaccacacccggctaattgccaccatgcccggctaaattttgtatttttagtagagatggggtttcaccatgttggccaggctggtctcaaaactcctgatctcgtgatccgcccacctcggcctcccaaactgctgagattacaggcgtgagcaccgcaccgagccagtttgtttatgtatttatttatttatcttgagacagagtctctttctgtcacccaggctggagtgcagtggcatgatcttggctcactgcaacctctgccttccgggttcaagcgattcttctgcctcagcctcctgagaagctgagattacaggcgcctgccaccatggccagctaatttttgtatttttagtagagatggggtttcaccatgttggccaggctggtctcgaactcccaacctcgtgatccaccctcctcagcctcccaaagtgctgggattacaggcatcagccaccacatctggcccgcagggttattatagatgcagaaagaagacttttattttatttatttatcaatttatttttcttcctttttttttttaatttttttttttgagatagagtctcgctctatccacccaggctggatggagttcagtggtgcgatcttggctcactgcaacctctgcctcctgggttcaagcgattctcctgcctcagcctcccgagtagctggaattacaggcgtgcaccaccattcctggtgtgttttttttttcctcccatagaaacagggtcttactatgtttcccaggccggtctcaaacacggcttaggtgatcctcctgcctaggcatcccaaaatgctaggattataggcgtgagccaccacgcctggccccagtgaggttttctttctttctttcttttatttgattatttttctgagatggagtcttgctctgtcacccaggctagagtgcagtggcgcgatcttggctcactgcaacctgtctcccgggttcaagcgattctcttacctcagcctcccgagtagctgggattacaggcacccaccaccacgcacggctaatttttgtatttttagtacagacgggatttcaccatcttggccaggctgagtcttgaactcctgacctcgagatccacccgccttagcctcccgaagtgctgatattacaggcttgagccaccatgcctggcccccagtgaggttttaaaagagaaactcgttctagcaacttaaattgcctttgaggaagtcagctaacagaggaggggccagtctaactaggtgtgtttgggcactgcctcccccagcagactgtgagctcctggaggatagtgactgggagaggacgacccctcccaactactctcaggcagctttgcagtgaacatttcttaaagtcatgaaagggtcaggtgtgatggcttacacctgtaatcccaatactttgggaggccaaggcaggaggatcgcttgagcccaagagtttgagaccagccagggcaacatggtgaaacccagtgtctacaaaaaattagctgggcatggtagtgtgtgcctgtagtcccagctacttgggaggctgacgagggaggatcgcttgggtccaggggacagaggctgcagtgagctgagatggtgccactgcactgcagcctgggcaacacagcaagacctcgtcttaaaaaaaaaaaaaagcactggtcatggtggctcatgcctgtaatcccagtacttggggaagctgaggcaggtggatcacctgaggtcaggaattcaagaccagcctggccaacatggtgaaaccccgtctctactgaaaatacaaaaaattaactgggcatggtggcatgcgcctgtaatccctgctactcggggggctgagacaggagaatcgctagaacccgggaggtggaggtcgcagtgagctgaggtcacgtcactgcactccagcctgggcgacagagtgagactccgtctcacaaaaaaaagaaagcatgaaagactgcctccaggagaagatagtgtttcctgtgaggtttgatgctgtctcactgggagacgctggaggccaaaaggacatagggaagatggtgtcctgcggccagcctttctgatgaacaacttttgggagtaacagatccggggaccccagagcacggcggccacgagagggcaccacagtcgcagaatcggaactcctgtgctttgtctcgggctctgggtcccagcggggccgcccggcggagccagagacgtcacggggtcgctgtctccggagcagcccctgggtggcgccagaggtccagcaggcccggaggccgagtccgtgggcaacttggggagcgttgagtcatcgcctgtgattaagcatttctctccctccccctccactaggtttcagaggtgccgggaagtctgagccttcgccctcctgctctccctccatgtccacctaggaggctgcctacacctgggcaagggcacccgggctcggctggatttccaggaagacccaccctatgacgactgcccccactcccagaccctccccccagcctgggattgagccctggggatgacccggggttggcaagggaagagctgaaatcgccctgtccttggggaccccaccctttgtgccatctgccgtttccctagtgctgggcatccagtcagccctcaataaatgcttatgaatggatcaacaacagacaagccctggtcttgggacaaggtgtagtgtgaaccttgctgggagtcctgtacctagatctccccttctccttctttgagtttcggcaccctggggtgctggggtgagctgctttgtgcagagaaacacaagtgggtgccttggggtagctgggggggttcatggcacctcaaagccagatcgacatcatgagaccctttctgtggacatttggtctttcagccaccccctgcactgacatgcaagatgggtggactcctcccatcccacccccagctccgtactggaggtgggggcttcatttgaggaagaaattgacacacaactagacagagcccccccccccgacatcctcatcactaaggaaggtgaatgtttatgtcaccatggatgccccagtgacaagccaggcagtttagagcaagggagggacatttagggggcagggaatgggaccatgtcctgggtgggcttgggcaggagcagaaggatggggctgttctggcagggcgggggggaaatgcatgtgggggaatccccacacccctgcctgcctcctccacctccagatcttgtcctgttggggcaacaggtggcagtgctcaggaagccagtgcgcccactgtgcagtccacattcctaccccgcccccgtcccacaaaccagccctgaggcctgtggtctggcagcggggagcaggaatcgagctctttgctgtcccctctgcccttggctttccgacttaaaagacttaaattggaaccggaggccctggggatgggggtgggctcttgcagacagctgggtcgtggagggggaagtggggaggaggagaaagaaaacagaaggatcccagcggctcccagggtctgggaatggagttacagtttcctagggcagagccgctggggctggagacccggggaactgggcttacaccagggcatgtcctggtggacagggggctcacctgggtgtgaacccaccctgctctttcctcccctcctgcatcaggtctccagggtgtaaggctgcagggtgggaggaggaccccgcctgagccatgggagctggggtgcaggagtcacagagtgcttcatgatgtcgaaggtccagtcagcctttcagtgacagatttcacagaggcattgttttctgtaaactggggatgacagcagcccctgtggttgctaacaggactgtcatctggctcgagaggcttgcgtgggatgagaaatgccacgacttcagccatgtttgcatccataacctcctgggatggcctccttcctgtctggggcccacaggcagcttgtcctggaggatgggccaagccaccggagcgcaggactcaccctgcagctggatgatcgcccagggcgtctcttaggcttcgacccgcgtgtatgctcaagagcctgcacacagatgtgggcacacagtcacccacccctggagattcgccccccccttgctttcccagggaagctgaggcataaaactcgtagagggcgaggaggaggaagtgggtagagaggtttgtgggcggaaggtgaaggaactgaagcctcagccccaaacagcaggtcacggggcctctacagaatcatttattatgggtcttcccagaagaaataaaatggaaatggggagaaagaaaacaaagggagctctcttctcctccaggaaagaaacaaattctgaaccatccatacttggctcaggaccctaaaatttgcaaatccggacaggatgggccctgctcagaggtggccagcttcctggagcccaggcccgcttgaagtcactggggctgtgggagacacagtttccctccctgaagccaagggtggcaaatgaccttgaccctggccaggtgaggccaggacctcacggcctcctttgtgttgtccatggaagaccaacttccgggcaactgaagggaggtttgtagggtccactaggaccccctggagcatcttggaggaggtctgcggacatgggggctgggtggcaaaggaaacacagacctcaaagtggcctacaactccctccagggtgggtcccctcgagggatattcccaggccccttggaagggtaaggcaggggggctttgcctcccagctttgtcttccggtagttaaggcgcttgaaagcttccaggtcccggtgggtgcccatgatcagccggctgtgggggaaacacaggcatgcgtgtggggctcagtggtcaccaggtgacagagggggccgcgcctcacagccacatggtcaccaatgactcaggtgcacacacacggctcacacacgtgcacataaccagaaagggcctgttgtagcacaggctgggcctgttgcagcctttcttcagagcctgtgttctgcaaaggacgggggaggggggccacggtgaggacccagcagcagtgaggtgcctgaccctcgctgcccacctaggggcttcacacttcagtccctccctgctcctctgagtccccactggcctcccgcagaccctgtgccgtgagtccaagcccaccccgtacttcaggttggagagctcaacgatgaggccacgcacgacgttggtggcatcctccatcctggaggcctcagaggcctggatccccacgaaggtcctggccagcagggaaggaaattgagagtggcccgacctcactggactaccagagctctccagtgggaggggcttccgcagggcctcgcgccatcttttccaggtgtccagcctgtcctcctctgttcacgacagaaccctgatggccaacccagctggctccactgcccagcaggcccagaacccaaccgcttctcccctacctgccctgccctctcaggacgctgctgccaccgcctccctatctcctgcccctgtggcttgtcccccacaggcactgggggctgtgaacttggaaacctagctcagaggcaagccctctcctcccgcagctgtgcaccacctgcctgccccgtgccctcccctcatcccccgcttctcccctcccctcggctctagccacactagactcctggccattccttgagcacctctcaggattctggaatgttctttcccaaatgtctcctcctggtggtggcttccctgattcctccttacattttaaccccttctccgctgcctttttttccccaacactctgccatctgactatctaatctgctgtctctcatgtccccacaccccgaatcccccagtagcattcaactctgtgttttgtcccacactgcctccccagcacccagggcagtgctagaaaggccagcccagatggcattcatatccttggaaggtttgggaggtcaaggtgggaggatggcttgaacccaggaattcaagaccagcctcggcaatgtagtgagacccccatctctacaaataatacaaaattagccaggcatagtggtgcgcgcctgtagtcccagctactcaggaggatgaagtgggaggatcagttgagcctgggagatggaggctacagtaagctatgatcctgtacaccagcctgggcaacagagcaagactctatctaaaaaatatcccgccaggcacgatggctcatgcctgtaatcccaccactttgtgaggctgaggcaggtggattacttgaatccaggagtttgagaccagcctgggcaacacggcaaaatcccatctctaaaaaaaaatatacaaaattagccgggtgtggtggcgggtacctgtaatcccagctacttagggggctgaagtgggagaatcatgcgagcctgggagatcgaggctgcagtgagctgaggttgcaccactgcactccagcctgggtgatgggagtaagactgtgtctcaaaaaaaaaaaaaaaatcacggaagagccaaggagccacagaacacctcccccaccccacagaacaggtgccactctcagacacaggcagtacaggtggccaggcgggtaagtgggggccacccgccctaaacccgcccatgccccaggcttcgcagcacctccggggctgtcactatggaaactgctgtcctgctgctcctgccttggtcaccctgaggtgtctggcagcccctgggtcttagcctcttgtgtgtgtcattcagcctcaagccaccaaaccagacccggggccctctgggagcttccagacatccaggacggtggggaggggagctgcattggccctgggacgctgtcggagattcagatgtgaaccctcccggctcttcactcaaaccacagcgggccgctctgatgaactgcctctggtccacgtgcaggttgtgtgtgtggctaagggaggtggccagtggcacagcaggtacaagtcacagggagtgacggcaggaggcagggacagagccgccctctgctaggggaggagaaggaggaggagggtgtgggggccacacacagccaagggctgagtcccaaaccctcctccacccctgccagacagaaacagaaacttggccataaataattgataagctgccgcctctgcagagaggcaggttcaagtgccaggtaacagagagggcagccacccagcgctggcttcgaggagggctgtgggagggcacgggaggaggggacaggctgcggagaccccgggcatggtgcgggggagagggtgccctcctcacacacagcaggctggaggacggctcactggtggcctgtgggagggaggaggtggttcgcctagggcaagagccaagtggggaggggaggaggtgagggcaggttagactcactcgggtgcccgcctggtgccagagctaggaacagctccaagatggtctcagccaacagttctgagccctgtctgggtcccctccccttcccagggactcaggaggaagctttggcccctcttcccagagagaaagagcccacagagccggaggcactgtcccagggctcctggggagcttctgggtggggagatgctgggttgggtgtcgatcactggtcactgtcgcccattctctgctttcggggagcaggggaatgtatacagtttgaaagacagggctcagctcccctgctggactgaggaagtcgaggcccagggagggagaactggggtctgtctcctccatctgtcaccctccttggtaaaatttgtgagggtcctggagccacttctcacccacgccacacctacctcggctgggccttggccactgcaacagggtctccattggcatgtgagctggggcccggccagcaagggcccggcttgttccccgaaggaaagagctggaaagagagcacaaggtgtgagtggtcgaggcctgggtcgggcaagctctgcacaggggaaccagaagtcacgctgatgcttttggcttcaccgcggccacagcaggtcacatcggggctggctgggactcctgcagaggaagagcggtaacggggaggaaatccacgatgggtagacccgaggctaccagcctgggctgcgcccgtcctttccccttggaaagagaaaggccacagccaaccctggtgtccgctcctaggcccgggcctcccacaggctgatctgggcagtgggggcaccactgtgccatgatctctggccctgacaccactgcagtctcctgcatgcccctcactgtctttacgggtacagagaaaacacaaagcgggggcaactgcggtgaagtggagtcgtctaccttggctgaatgtgccacagacatcctgttaggaaaggagtttgcaaatataacacgaggggaaaactcccagtgaatacaggggaaagcctggtaactccacggcgcttaagcttctaagcgtcaatggtggtttaatttccatggaaaatgttaagctccgttacagtggtgacctatgatgtccctcagaaaagaggcaatgagccaggctggggacacctgtaatcccagcactttggaaggctgaggtgggaggattgtttgaggccaagagttccagaccagcctgggcaacacggcgagaccctgtctgtacaaaaaaaaaaaaaaaaaattagctgggcatggtggcacgcacctgtggtcctagctacttgggaggctgaggcaggaggatcaactgcttgagcccgggaggttgaggctgcagtgagctgtgattgtgccactgcactccagcctgggcgacagagcaaggccctgtctctaaaatttaaattaaatgactccatatgcagattgcagaagctccatcagtccaagagtgagtgcaaaggatctatgagaaagtaacaccaaaccctcccatgacgagaccttggtttgaggtttgaaagctctgtctctgctgtgtcacctctgagtcccctcctctagcacagtgtgtggccacagtgaggtcaggaggaggtgctgagacggcccgctcgatccatctttgctgttccccgtgcccctgcccatgttgggagacacgggcctcggccttcctgccgggagccacccggaaccttcccacgggaatgtgttccttgcctgggtcgcctcaacttgctggggaacgcctcgtgtcaaagccaaacacgcccaggccctggcagtgctgtcagggcggtgcctcctcccctggctggggaaaggctgctaatgctggtcgggtttgaccagcctggctgtctgtctggatccccccaagtctggatttcagggtctttttccaagcttgcagtttggcagcccgtttaggagggctaggggcttcacctgctggatgccacctaggcacacctggccccaaacaccttaaccatttcccagccttctctccaagccaccactcacgagaccacagactggaggcaatggaggcggctcttctctcaagcgagggatttgcattttgcaaggcatgaagctctcataaaatttcagctgtgcccagcaccagaactcctgcctttcccacatgctcgtgttcagcctctaccactgaaccacactgtgactcactttttttttttttttgagacagggagttcagcacccaggctggagtgcagtggtgtaatctcggctcactgcaacctcaaactcctgggctcaagtgattctcctgcctcagcctcccaagtagctgggactgcagccatgcatccccatgcctggctaattttttcttttcttgagagagtcttgctctcttgcccaggctggagtgcagtggcgcgatcttggctcactgcaacctcagtctcccaggttcaagtgattcttctgcctcagcctccggagtagctgggattagaggcacacgccaccatgcccagctaatttttgtattttggtagagatggggcttcaccatgttggccaggctggtcctgctctcctgcctcggtctcccaaagtcctgagattacaggtgggagccactgtgcctggccatgaatttttttttttttttttaacatctcaacacagggacagccaaagaaacagaggctgacatttgaaaagcaaattggactctgcgttccaggacgcggcggctggggcatgacctgggtgccagcctggcctcctcccctcccacctgcctcacctctagcaggcgcacgaactcctccagagtcttcactgccacacccagtgtgtggacagagaactgcctacctccctgggcgtgactgtgatgccctcagcccaggctcaggtgtgccaacggctagggaggtcgctctttccctggggggcagggctgaagcaaggctgccatctgcccagacaggagaatgaacgccaacggctggcaccggctctggagccagaggaggccacatccgggcagccggtggggcgggcagatccctgaaggaggcaaagcccttacacgttctggcagaaaaacaaaatgacttatgtatgtttggaaaagaatcatatcaggacccccagaggaccctaaggagatgggcaaaggctcttttgcagcttgggagtgaagccccctccccaggcccaggtataaagccatccccaggcccagcttctctccatctgtgtctacccgcctcaatacatcccctgggaccccacggccagggtcaggcactgaagcagaagctgccaggggctggcactcctggggactccagttcaatgtggggggcccggctgagaaagcagctgtgtgtcaccatccctagatatgtcgacaaccaccaaaaggcaggtctacactttctggaaaaccaccgactccacacccagtagagctgcaactcggactcctatagtcgttggctgtgtaaatggtaagccctgagccccagctccccctctgccactgcaccgagtgaggagggggcttgtggaggttgggtgcctgccctgggcaggtatgtctgtcactcagggcagctctcacctgctcaggtggggcttcgaagtcagaggcgtccagggcatcctgtatctggctgtccagcaggaagtcgagttccacagctaaagagtctgcccaggtgccctggtctgcagaatgaggcaggtggtctcgctgccctgccagctctgaggtggtgtctggaatgccctgctgagccccgggctcctggagagggtcgtctgctatttctctgtgttccagcacaacagaggcttgcggggacacacggaacccctcgaggtctcgttcgaggttctggccacctaactcggcttcctcttgagcaggacctggctcctgcttctgattgacacatggacctgtgtccggggatgcatgaccggaatctccagcacccatcatggactctccgctcccaggtgccagagccagggaggctgtagggcccactaggacatcgccggggggcttgccatcctgccctgcctccccactttctcctgtggtttccccagtgagcgaggtgcagcctggcaaggccctcctgtggcctccatcagcggccttcctcctgggagaggcaggtgatatggcactggcctgcccatcgggcccagccacctccagagccctctcttccagctcagtggggtctgtgctcaggtctgcgatgacaaccatcccgagggaggagcatcccaggctgctatgagtcccttccccttccctacccatcctgctgggggtctgctgggggtcaggggagccctgggccacagacccgggttccaggcaccaagaggcagggcccagtcctggagcagggcctgaggtaggagctgatgctggggtacaggggacaccgtctccctcctcctggggccctccaggcaggccagcccctgctgtcctttgggcccctccctcctggggggctcctctgtctggcttctccccttcagaatcaatgcttggtaggtgttccttttggccaccgtcacctggaaccctgtctgtctcaggcttgctgtcatcggccccttgttctgacaggtggtcttggctggccctctgtgaggcggacaaccccgtccccctgtctggagggtcatcaggctgagaatccccactgccgggcaccgcctgcacagggctctggctgctctgctcagggcgggcactgtctgcctgcgttgggtcccccagctccgtggcctcctggagggggacccccagggtctccactagcagctggcatcctggactctgggcgctggactctgcgattgtttcctgtggacagaaaaagactcagccccggggcctttgataaccaagttctccgaagagttttctattaggttggtgtaaaagtaattgcgggttttgtcattacttttaatggcaaaaattggccaggcgtgatggctcatgcctgtaatcccagcactttgggaggccgaggtgggcggatcacttgaggtcaggagttcaagatcagcctggccaaaatggtgaaaccccatctctactcaacaaatacaaaaattagccaggcatggtggcagttgactgtagtcccaactactcaggaggctgaggcaggagaattgtttgaacccgggaggcggaggttgcagtgagccgagataggactgcactccagcctggacgacagagtaagactctgtctcatacacacaaaaaaattagtggcaaaaactgcacttacttttgcaccaatctaatagttgtcaccaccctgttcaaagactcagatattggcaccggccatcatgcatggaaataggcatcagtaccagggccggcgactggagggggatctggaagcacagaaacctctccttccaccaagctcttctctccaccagcaccaggtactcaatcagatcagggatatgaaaatcaaggtggcattcagaccacaccaatgtcaatttcctgtttattattattattattattattattattattagacagagtttcactcttgttgcccaggctggagtgcaatggtgcgatcttggctcactgcaacccccacctcccgggttcacgcaattctcctgcctcagcctcccgagtagctgggattacaggctcgcgccaccatgcccggctaattttgtatacttagtagagacagagtttctccatgttgaccaggctggtctcaaactacagacctcaggtgatctgcccatctcggcctcccaaagtgctgggattaaaggcatgagccactgcgcccagcggctattattatttttattatttatttttcataattttgagacagggtctcactctttcgtccaggctggagtgcagtggtgtgatcacggctcactgtagttttgaccttcctagattcagacgaccctcccacctcagcctcctaagtagctgggactacaggtacacaccacaactggctaaattttgtggtttttttggtagagatggcgttgtgccatgttgcccaggctggtcttgaatgcctgggctcaagtgatcctcctgcctcggcctcccaaagtgctgggattacaggtgggagccactgcacctggccaagttttaaaacaattattgtagcctggacgcagtggctcatgcctgtaatcccagcactttgagaggccgaggcaggcggatcatttgaagttgggagttcgagaccagcctggccaacagggtgaaacccctattctaataaaaatacaaaaataagccaggtgtggtggtgtgcacctgtagtcccagctactggggaggctgaggcaggaaaatcacttgaacccaggaggtggaggctgcagtgagccgagatcacaccactgcactccaacctgggcgataagcaagactccatctcaaaaaaaaaaaaaaattattgtagagacagagtcttgccatgttgcccaggctggtcaagggaagtctcccaaagtgttgggatcataggcatgagccactgcacctggccaattgcctagttttggtgatggactatagttatgcatggtgttaccactcggtgaagctaaaacagagaacaccggaaattcactctgtaccattttgtgtttttttaaaaattgtgctaaggccgtgcgcagtggctcatgcctgtaatcccagcactttgggtggctgaggcgggcagatcacctgaggtcaggagttcaagaccaggctggccaacatggtaaaaccccgtctctactaaaaatacaaaaattagctgggcgcggtgggcaggcgtctgttatcccagctacttgggaggctgaggcgggagaattgcttgaacccagtggggcagaggttgcagtgtgccaagatggcaccatcgcactccagcctgggtgacaagagtgaaactctgtctcaaaaaaaagaaaaaaaataaaataaagaattgttgcatagtcaacacacatccatagcgcaatgtactgaaaacggtgggtggagaggtgcaggcctcaccattgccaaagaactccagggttaaatggggctgccgaggctgggccaggaggctgcacctgcgctgggctcagcctggctgattttagagccttaccaggctaaaggccccactcccacggtcctcatccttcatctcttcttttcttgtcactgtcttcctggattttgcaaactggggaacaaacctcccgaatgagttctgtaaaccggatacaagaacaaagcagcaataaagataagagaggaatgaggtcttaggaaaaaagcaaccccaaacctgctcctttcttgtagccttgagagaactccacccttgccctctgggcacattccctccagcccctgtagaccatgagtgagcaattggtgacaaagaagggagacacagagccggaactttaagggaggcagtggtgcttctatatccacgaggccacaggacgagctcacctgggaaggaggaaggggagctggctccttttctggttgacggaggagccggcagggagatcctgtttcctcatcaggggagctatgtaggaaaagataaaactgaaggagatctgcccgggtgcggtggctcacacctgtaattgcagcactttgggcggctgaggcgggcagatcaccgaggccaggagttcgagaccaacctggggaacatggtgaaaccgtatctctactaaaaatacaaaaattagctggatgtggtggcgcacgcctgtaatcccagctacttgggaggctgaggcagaatggcttgaactcaggagatggtgtttgcagtgagccaagattgtgctactgcattccagcctaggtgagagaacaaggttctgtgtcaaaaacaaacaaacgagggggatctgaaatcctcctaggttgtcactcacctatcgagacaaacgcaaaacaaaatccaacaggaaaccagtgctaagagtctcctaggctgggcgtggtggctcatccctttaatcccagcactgtgggaagctgaggtgggtggatgcccaggagtttgagaccagcctgagcaacatagtgagaccccttttctacaaaaaatttaaaaattagctggacgtggtgatgtgtgcctgtggccccagctacttgagaggctgaaatgtcacgatcatctgagccaggggagttcaggctgcaatgagctatgatcacgccactgcactccagcctgggtgacagagcaagaccctatctcaaaaaaaaaaaaatgtctgctagatggaaggccctggaaaacctgctttgaaagagtgggatggggatggagaagcagtgacctgagaacatttaactgtcaaggagggtgcagagtcccacctggagaatacactgccttaacaggtgactttgttacatttataatcccaggaattgccttctgaactgggaatagggatattctcatttggacggacactccagccctgacacggcacattctagggaaaggaaattgtggatgcaagaaacatagtgtctttaaaaactagtgaaacttagggttatatttaaataaataagggccaggcgtggtggctcacgcctgtaatcccagcactttgggaggccgaggcgggcggatcaccttaagtcaggagttcgagaccagcctggccaacatggtgaaaccccgtctctactaaaaatacaaaaattagttgggtgtggtggcgggcgcctttcatcccagctactcaggaggctgaggcaggagaatcgcttgaacccgggaggtggaggttgcagtgagccgagattgtgccactgcactccagcctgggtgacagagaaagaccctgtctcaaataaataaataaataaataaggatatgtatatcgttttgttttggctaattattttatttcttgtagatatggggtcatccttgttatgttacacaggctcctcttgaactcctgggctcaagcgatcctcttgcctcagcctcccagtgtgctgggattataggcatgagccactgcactcagccctgattgcttttctttttttattggtcgttagctcacataacaacaattcctttgttcccttcttgattaaggaagaggaggaatgtggaagaaggatgggtttgaccagcagacagaatatgagttctgtaaccctgaaaaatgcaatgttatctttgcccacagttaaaacttttttttctttttttagatggagtctcgctgttgcccaggctggagcgtagtggcatgatctcagcttactgcaacctctgcctcctgggttcagtcgattctcctgccttagcctcctgagtatctgggattacaggtgcgccaccacacccagctaatttttgtatttttagtagagacggggttttgcagtgttggccagtcttgtctcaaactcgtgacctcaagtgatcttcccccctcggcctcccaaagtgttgggattacaggcattagccaccatgcccggctaaaacatcaacccttcttaccagcgaggaaagctaggagaagcgagatccgagggccctgagctctgggagggagtgggtcacagcactagataggttgtgggtctctttcccaaagcattgctgtctgctgagctgctgtgctatgtggactgtcagtggggagacctgccggaatgttcagagccacctacctggagacggcctttcctggttcctccccgtgctgctgtgtagagggaacaggtcccaatttgccctctggctcctcagggtgatgtaaacagcccaacatggaactctgggggtccccatagaagtctcctagccttgggttctttaggggttttggaggacagagtccctctcctgttttagagacagaggaagatgaaggggtgggggatacagccactgctcatggctgacaactcaggtctcccccactacaaccaggctgcacgcgagaaggggccgaatccatttcactctctgcggggtcccaagtgcctgtaagagcatcttgtacactgttggtgctcaataaataaattatccatgactggataaatgcacaccaccaagggcagacaagactaaattatgtaccattctaatgtgctgagacatctgcaaaatagccatcctgggaaaactgggactcacagccaccgggtgctgaagaggtgatgctttggccacgtcctggccccttgcatttctgcactaacttccccatcactgaaagcaattgcgatgtgtcttcttctggcatttaagaggctaaagatgcttattgacatctttgtatatatagcgcagtggctcacgcctataatcccagcactttgggaggccgaggcgggtggatcacctaaggtcaggagttcaagaccagcctggccaacatggcaaaaccccgtctctactgaaaatacaaaaattagccgggcatggtggcacccacctatagtcccagctacttgggaggctgaggcaggagaatcgcttgaacctggtaggcggaagttgcagtgagctgagattgcgctactgcactccagcctggttgacagagcgagactctgtctcaaaaaaaaattaatatatattatatatcatatataaaatacatacatattcatatttaatatatacatacatataaaatatataattataatgtatttacatattgcatatttataattataaaatatattatttaaattatatatttatgatatattaatatattataaacattatatccttgtattatattatatatttatatatgatatatatttattaaatatatactatatatattatatatcccattatattgccaggttgttccatgtgatctaaagccaggccacgccacctcaggattcagcctcagccaaatatgtaaatatatatatttatacatatgtatttatacatacatatgtatttatacatacgtatttacatatatgtatttatgtattatatatactatatatatattttttctttttttaagacagggtctggctttgtctcccaggctagagtgaggtggtgcaactgtggatcactgcagtcttgacctcataggctcaagccatcctcccacctcaggccactcaagtagctgggacaaaaggtgtgtgccaccatgcctggctaagttttcttttgcttttgttttgttgagacagggtctcatatgttgcccaggctggtcgtgaactctggcgctcaagtgatcctcttgtctcggcctcccaaagtgctggaattacaggcatgaaccactttgcctcgccagaatctatcttttgaattaagaaaactcccttacatcgaaactttttttttttttttttgagacagagtctcgctctgtcaccaggctggagtgcaatggcacgatctctgctcaccgcaacctctgcctcccgggttcaagtgattctcctgcctcagcctcctgagtagctgagaccacaggcacgcaccaccacacccagctaatttttgtatttttagtagagacagggtttcaccatgttggccaggatggtctcgatctcttgacctcatgatccgcccgcctcggcctcccaaagtgctgggattacagacatgagccaccgtgcccagccacatcaaaactttcaatagtggctggcttgtaagacttccccaagcctggccccaacctaatcatgcattcagtgaacaaatgataagggttgactctagtgagttccacaccagatgctgtcctaagaacttgtgtgtgttaagataaaagctcaaggcagggtgctgctgttatgcctgccttacagaagtaccttgagcaattcaatattatctttgtccatgattaaaatattggcctttgccaccagcaaggaaagatgccagcctgtaatcccaggactttgggaggccgaggcaggtggattgcttaagctcagcagttcaagaccagcctgggcaacatggcgaaaccctgtctaaaaagtacgaaaattagccaaacatggtggtgcatgcctgcagtcccacatacttgggaggctgaagggggaggatgacttgagcccagaggaagagattgcaatgagtccagactgtgccactgcactccagcctgggcaacagaactagagcctgtctcaaaaaaacatttaaattaaacatttaaattaaaataaataaataaaagggcaatatggcaaaaccccatctctactaaaaatgcaaaagttagctgggcatggtggtgggcacctgtaatcccagctacttgggaggctgaggcaggagaatcgcttgaatccggggggctgaggttgcaatgagccaagatggcgccactgcactccagcctgggcaagggagtgagattccatctcaaaaaaataaataattaaattaaattaaaaggaaaggaaagatgcgagaattgacacccaagggccccaagttcccagagaggtgaaaacgttaaggcacacagaggcccaggaaccaaggctggcaccccgtccaactccagaaccagcacacttaagaatacttgagcatttactgaatgcctactatgtagtagatttctgccaaggcaggcagaacaaaaagacaaaccaacagccaggtgtggtggtgcacacctgcagtcccagctactcaggaggctgagggggtaggatcacttgagtccaggatctcacttgggtaacacagtgagatcccacctctataaaacatttaaaaattagctgagggtggtggcatgcacctgtagtctcagctactcaggaggctgaggcaggaggattgcttgagccctggaggttgaagctgcagcaagccgtgattgtgccactgcactctggcctcagcaacagagctagatcctatctctaaaaaaaacactaaagaataacactatccaggaccaggcgcagtggttcatgcctgtaatcccagcactttgggaggctgaggcgggcggatcccctgaggtcgggagtttaagaccagcctgaccaacatggagaaaccctgtctctactaaaaatacaaaattagccgggcatggtggctcatgcctgtaatctcagctactcaggaggctgaggcaggagaatcgcttgaacccgggaggcggaggttgcagtgagccgatatcgcgtcattgcactccagcctgggcaacaagagtgaaactccatctcaaaaaaaaaaaaaaaaaaaaaagaataacactatccaaaccccagatggactctttccaacctcagctctacattacacacttacacatcgtgaagtaaacctactgaatgagtctctctttcctcgacgccaattgctagggtctgcatcagtccccattcagctgtttgccctccactaaaccacagcaatcttcctgtaattgcttctaattcttcttcttcttctttttttttttttttgagatggactctcgctctgttgcccaggctagagtacagtggcatgatctcagctcactgtaacctctgcctcctgggttcaagcaattctcctgcctcagcctcctgattggctgcgactacaggtgcaagccaccatgcctggttaatttttttgtattttcagtagagacgggttttcaccacgttggccacactggttttgaactcctgatctcaagtgatctgtctgccttggcctcccaaagtgctgggaatgcaggtgtgagccatggcgcacggtaagttgcttgtaattctgtcagttacagttcgggagtgcccgtttagaactttatcccactgctgtgtatttgcttagctctcgctgagagaagcattttcctttgtcctctgactacagctggaggatctccagggcaggaactgagtgcaatgcaccctttgatctccccttcgccctgccctgccccatcaggtgcccacctcaaaggatgtaccaccacaagtaaagctccgatggacattgcttatagaaacacattcctaaccgtccgggtgcagtggctcatgcctgtaatctcaccacgttgagagggtgaggtgggcagattgcttgaggtcaggagttcaagaccagcctggccaacatggtgaaaccctgtctctactacaaatacaaaaaattagccaggtgtggtggtgggcacctgtagtcccagctaatcaggaggctgaggcaggagaatcacttgaacccaggcggcggaggttgcagtaagccaagactgcaccactgcactccagcctgggtgacagagcaagactctgtctcaaaagaaacacgaccttgtggtctgccagaaaagacaaaatatagctgctttgtttatttggtttcttgagattctcaaacacttgctcacttggctgactgaatggccatttgtaccaaataaaaagcaaaaaaatatcaatggcattgaagagtcttctctttccttcctgtgatctgtccacatgggactaatttaagaaaaaataaggcagaaccttgtgttcgacaccaaagactaaagacattgggagggaaaaggcctctttcaccacctgccagaattttcttcctctctctccacccttccagcacacacagaaagggttgtccagggccagcccagaggtccactgagctggggagtctaccgccaacagaggccccaagtgacctgctgtgggtggacctggctgtccccagcttccccctccaaggtcagagaaattctgatgcctccaagcagcctgttgctcatctctgcacaaaacatgttcaatctgctgatcatttcctctcctgtcccatatcttgggggaaaaaacatgcacaccattccctaaattcatcagccactaaattaaaaagtcatttcaaaattttgaagaaatttaacttactttagaaaatgataggcaaatggaactctactacatcatattgggagtttgtctttctgacttggtttgttcctttttttttttagacagagtctcactctgtcgcccaggctggagtgcagtggtgcaatctcagctctcctgggctcaagcgagtctcgtgtctcagcctcccaagtagctgggattacagacacatgccaccatgcccggctaatttttgtgtttttagtacagatggggtttcaccatgttgaccaggttggtctcgaaccctgacctcaaatgatccatccacctgcctcggcctcccaaagtgctcagattacaggcatgagccatcgtgcccaacaatctttctttttttctaagagacagggttttgttctgtggcccaggctggagtgcaggcgcaatcatagctcactgcagcctggaactcctcagctcaagccatcctcctgcctcaatctcccaagtagccaggactacaggtaggcaccaccacactggttaattaaaatttttttttttttttagagactgggtaacattatgttgctcaggctggtcatgaactcctggtctcaggcaatcctttcacctcggcctcccaagtagcctggagtacaggtgcgtaccaccaagcctggctattttggggtgtttttcttttcaaatgatgaaattgtataggtatgttgacaagtaaacatggtcatgatctaccacaaagtgaaaaatggaggttgcagatcagtaagtgtgatgattcgattttccaataaaaacattttatctgggccaggcacggtggctcatgcctgtaatctttgggaggctgaggcaggcggataacttgaagtcaggagttagagagcagcctagccaacatggtgaaaccccgtctctactaaaaatgcaaaaatttgccaggcatggtggcaggtacctgtaatcccagctactcaggaggctgaggcatgagcatcacttgaacccaggaggcagaggttacagtgaaccaaaatcgtgccactgcactccagcctgggtgacagagtgagactgtctccaaaaaaaaaaaaaagaaaaaagctcaacactgtatctgtatatatacagaaaaagtctgaccaggcatggtggctcatgcctgtaattctgagcacattgggaggccaaggcaggtggactgctggagcccagaagttcaagaccagcctgggcaacatagtgaggcctcgtctcttccaaaaaatacaaaaattagccagtcatggtggcacacacctgtagtcccagctattccggaggctgaggtgggaagatcacctgagcctggggaggtcgaggctgcagcgagctatgattgtgccactgctctccagcctgggcgacaaagcaagactctgtctcgaaaaaaagaaaaaaaaaaaagctgggtatggtggctcactccagtaatcccagcactttggctgaggcgggcagatcatgtgaggccaggagttcaagatcagcctgggcaacatggtgaaaccccatctctactacaaatacaaaaattatctgagcgtggtggcagacacctgtaatcccagctactcaggaggctgatgcaagagaatcgcttgaaaccaggaggcggaggctgcagtgagtcaagatcgtgccactgcactccagtctgggcaacagagtgagacatcatcttaaaaaaaagtctgagctgggcgcgctggctcatgcctgtaatcccagcactttgggaggccgagatgggcggatcacctgaggttgggagttcgagaccagcctgaccaacatggagaaaccccatctctactaaaaatacaaaaaaattagctgggcatggtggcatatgcctgtaatctcagttacttgggaggctgaggcaggagaattgcttgaatctaggaggcagaggttgcggtgagccgagatcgcgccagcctgggcaacaagatcaagactctgtctcaaaaacaaaaacaaaaaagtctgggctgggcgcggtggcctactcctgtatccccagcactttgggacaccaagacgggcagatcacctgaggttgggagttcaagaccagcctgaccaaaccctgactctactaaaaaaatacaaaaattagctcagcatggtggtgggtgcctgtaatcccagctacttgggaggctgaggcaggagaatcgcctgaacttgggaggtggaggttgcagtaagccgagatcgcgccactgcactccagcctgggcaacaagagcgaaactccgtctcaaaaaaaaaaaaaaaagtctagaagcagtgtaccgaggttagagtcctgtcctgtttttcatgctgttctacagttgatcactgtcctatggctatgctagatgtcaacattagggaaagcttggagaagggtagctagaactctctgaattatttttgcaacttttctttaagtcccagattacttcaaaataaaagttttcttaaaagtctggaagaagaattgttaacagcagtgtacatttgtgtactaccttaggtcagttctgggtgctttacagatactaatccacatgtgagctctaagggcaggattcttcaccttggaggacatttggggctggatcattctctgtggctggggggcatcctatgcatggtaggatatttgagcagcatccctggcctccacccactagatgtcagtataatttccccagttatgaaaaccaaaaaaagtctctaggccgggcacggtggctcccacctgtaatcccagcactttgggaggctgaggcaggcagatcacctgaggtcaggagtttgagaccagcctggccaacattgtgaaaccctatccctactaaaaatacaaaaattaggcgggcgtggtggtgcacatctgtagtcccagctacttaggaggctgaggctgcagaatcgcttgaacccaggaggtggaggctgcagtgagccaagatcttgctactgcactccagcctggacgacagagtcagacttggtctccaaaaaaaaaaaaaataaagtctccaaacattgccagctgtctctggaggtcaaaatcccttcctctcacctagttgagaaacactgctctaaaggaaagggtagtggcttttattatccccaatttacaaaaggggaaactgtggcacagaggaaatcatccaccaccacacactgagcagaactgggatgaacccaggttttgggccccagagtaaaacactcagccacataccgagtggccttgtagtacatcaagcattattccaggggtcatctctgggactggttccgcagggaggctgtcccgctgccctgaagcccggggaggcctcctctaagctgtgggaccccaccagaggcttgcagaagctccagaaaactttcacttttacttttcctgtatgccctctccgttatttctatttttctttctttctttttttttttgagacagggcctcaatctatcagtcaggatggagtgcagtggtacgatctggattcactgcaacctccacctcccagttcaagcaatcttcctgcctcaacctcctgagtagctgggactacaggtgcctgccaccacgcccagctaatttccttactttacattgtagagacaggatctcgctatgttgcccaggctggtcttgaactcctggactcaagcgatccgcccacctcggcctcccaaagtgctaggattacaggcgtgagccaccacaccggccttctatttttcttaccagcatgaattaaatcctttttgtctttttcttttttttgagacagagtcttgctctgttgcccaggctagagtgcagtggcaccatcttggctcactgcaacatcggactcccaggttcaaacgattctcctgcctcagtctcccgagtaggtgggactacaggcatgtgccacaacacctggctaatttttgtatttttagtagagacggggtttcaccatgttggtcaggctggtcttgaactcctgaccttgtgatctgcccgcctcggcctcccaaagtgctgagattacaggtgtgagccaccgcacccggccaatccttgcttccttttaaggaggttaaggcagtcgtgttagccagatctgcaataaacaagcccacattcttcccacaagcagaagcagaaatcaacaagtgtccatttgaatgaacgtacctgaggtccgcagcttcttcctcttagtcattttatcttccccttgagaaatctgaaaacaagcaaaatctctcatcattataagcagtctctgtctctgtttatatccagtggctttggctgagagcagaggttacccctacctccacctcagcccatttggctgccccaggggtcagatggctcccactgggacacaggatgggacacagagtcacagccactttgggccatggccaggtaggaattcaaacctcctccaaactgaagatcttatgcccaggacctgaaagacaaatgggccctggggggtccttatagatagccccggggacccagactctggtccctaggatgaaacagcctgtgtgaagcccctccctccagactggggtatctgggggcccttccaaggacacttgaggactctccaggggcctctggagaccagcctggccaatatggtgaaaccccctctctattaaaaacacaaaaattagcctgggcatcgtgacgcacacctgtaatcccagctacttgggaggctgagacagtagaattccttgaacccatgaggcagaggttgcagtgagccgagatcgctctactgcactccagcctgggcgacagagcgagactccgtctcaaaaaaaaaaaaaaaaattagtcaggtgcggtggcacacacccgtaatcccagctactcaggaggctgtggtacaaggccaggaggcagaggttgcaatgagccaagatcgtgccactttaaaggggacagctgggtccttggaggggaaagagctgccataggccggtttctcccagccttgggggcgaggcaaaccagaacggacctgggccacagaagtcgttgaggaccctctgtccttatcagaaacgagctctgcctggatcagttgggaataagtcgcttgaattatccgcgttactctttttggaaaaaataaatggccaaattggccctcacagaacgctggaggcctcgagtccggaggtgaaagatggaaaggcctgagggtgggcgctgtagaccccgctcccggtgacaagccccacactgacactacgccgaccaccgagaagtgaggactccacaggccgagagcccacgtgaagccggagcccgtcggtgactgacagacgctctgaaccccacagatgtcgccgcccctcacacctgcgcgcgctctgcctctttcccgcgccccgcgaggtcccgccccgcgcatgagcgacgcaaacaccgccctcgcagcccgcgacagtcagcaccgccccagccaggcgcctgcgcgcccacgcactacctgccgggagttgtagtttcggctcggcagacccggcgagcccagtggccgcgctccggtgcggcggcgcccgaggcccgaggcggaagtgggacggccaagcagggaagcgagggctcgggatcgacggccgcggggcgccgacgaggagtgcaggactcaggaagggcgagtgcgcggcgacagagcccggggaaggaggcagggcaaggccgggcttgggggcaggtggtccgggcatccagccttgaagatgcacaagaggaaaggacccccgggacccccgggcagaggcgccgcggccgcccgccaggtgagtttgcgccccacggcccgacctggggatccctccccacccccgtcactcgctcagggaagggccccaccccccagggaagcccgatctccgccccacaggtaagccccggtccccgcctccccccaggtgaggctccaacaccacccaagtgtggcctactggccttggctccccagctcctggggccctgccccgggttcggggccacctgttgccacagctgctccagtcgaggaggggcagtcctcggacttgacacatcaaacccttgcatcagtcgggccatgtcagactctttttattccattgtacagatgaggactttgagactcagagacgtgaagacatctgcccaaggtcatagggattaacagcttggccagggctaagcacaaatccagggctgcagccataagcttatggcactgtggctggaccccttctcactctcccgacttctttgccccaggcaccagatagtttgatttttctcagttttgatggaaggagcccaggacatagcttggtgttcagatattagagtctggctgacctgaagttccctcctggcctctgtacatcggacacttgactttacagctctgagcctcagctttctcatctgtaaaatggagatctctataatcccagcacttcaggagatggaggcggaggcagaggtgggagagtcatttgaggccagagtttgagaccagcctgggcaaaagcaagacccccgtctcgacaaaaaaagactaactgggcatggtggcatgtgcctgtagtactactacttgggaggctaagaagggaggattgcttgagcccaggagttcaagaccgcagtgagctatgattgcgctacttctgctccagcctgggtgacagaacaagactctttctctaaaataaagataaaaaattaaaaatggaagtccggggtggtgtctcacacctgtaatcccagcactttgggaggccatggcgaaaccccatctctactaaaaatacaaaaattagctgggcatggtggcgggcacctgtaatcccagctactcgggaggctgaggtgggagaatcgcttgaaccgagaggcggaggttgcagtgagctgagatcgcgccactgcattccagactgggtgacagagcaaggctccttctcaaaataaataaataaattccttctgaaaataaataaataaataaaaaattaaaaatggagacctccaagagaccctacattacaggacagttgtagagagtcattgagatagtttatggaaagtgctagaacatagcactcaataaatgttactattatcattattactagttggtggaaccatacataattgccaatatttggccattttttacctacaggaaaggcaatttcatatggttaaacacgatgttatcacatcatgattggtcattagccaagataggaagacgggtctgcatggcaaacctgcattgtggttaggggttctttttttgtttgtttgtttttgagacagagtcttgctctctcgccccaggctggagtgcagtggcgcaatctcggcccactgcaacctccgcttcccgggttcaagcgattctcctgcctcagcctcccgagtagctgggattacaggcatgcgccaccatgcctggttaattttgtattttttagtagagacggggtttctccctgttggtcaggctggtctgtctcgaactccccatctcaggtgacccgcctgcctcggcctcccaaagtgctggggttacaggcgtgagccaccgtgcccggcctaatttttgtatttttagtagtgatgggatttcaccatgttggccaggctagtctcgaactgctgacctcaggtgatccccccaccttggtctcccaaagtgctgggattacaagcgtgagccactgcacctggccctgtcgtcagggcttctaattgctcttcttttttttttggagacagagtcttgctctgttgcccaggctggagtttggtggcgcaatctcagctcactgcaacctccacctcccaggttcaagcaattctcctgcctcagcctcccgagtagctgggattgcagacaccgccagcactcccagctaatttttgtatttttagtagagacggggtttcaccatgttggctaggctggtctcgaactcctggattacaggcgtgagccaccgcatgcagccatcatgctcttgaagcccaaccttcccacacagcccctctgctgaggatgctggaaagaaaagcccaagtgtacagagtagctttgctttgggcaaagtgtggagcctgcttccttccctccttccctccctccctcgcttccttctttttttccttccttccctccttcctccctccctctctccctccccggctccatctctctttctttctttcctttcaacagggctttactctgttgcccaggcggagtgccgtagcacagtcatggctcactgcagccttgatctccccaggctcaagtgatcctcctgcctcagcctcccgagtagctgggaccacaggcacacagcacaactcccagctaattttaaaaagttttttttcctgtaatcccagcactttgggaggccgaggcgggcagatcatgaggtcaggagatcgagaccatcctggctaacaaggtgaaaccccgtctctgctaaaaatacaaaaaaaaaattagccgggcgtggtggcgggcgcctgtagtcccagctactcgggatgttgaggcaggagaatggcatgaaccccggaggcggaggttgcagtgagctgagactgcaccactgcactccagcctgggtgacagagcgagactctgtgtcaaaaaaaaacaaaaaacaaaaaactttttttttttttgtagagttgggggtctcactgtattgcccaggctggtctggaactcccagacacaagccatcctcttgccttggcctcccaaagtgctgggatgacaggcgtgagccactgcgcccagccaggggcctgcttttcccactgaacttggcccagcagcacatcataagtgtggattcagatcagagagctgggtctcttgccctttgccccaggttgaactgtgccagagggcctggcctatcttggaacacctgttctgggcttgttccagcctcctggcactccccagggaaatggctttccctgggagaccttgtttccttcctcccaaggggactctctggccatcatggctgcctctagccatgtggtgaaccaaaggtctgactgaacccttgctgttcccctagctgggcctgctggttgacctctccccagatggcctgatgatccctgaggacggggctaacgatgaagaactggaggctgagttcttggctttggtcgggggccagcccccagccctggagaagctcaaaggcaaaggtgagatggttaacacaccctcagaacattttctgatctcctgcaagtggttcgggcgcagaactgggggcactgggtaggtaggggaaagaagacagagaagacccctgttctcctggagccaatgatctgggtaagagagtcaagatcgactctgaggccgggcacggtggctcacgcctgtaatcccagcactttgggaggccgaggcaggcagatcatgaggtcaggagattgagaccatcccggctaacacggtgaaactctgtctctactaaaaatacaaaaaaaaaaaaaaaattagccgggcgtggtggcgggcgcctgtagtcccagctactcaggaggctgaggcagaagaatggcgtgaaccagggaggcggagcttgcagtgagccgagatcgcaccactgcgctacagcctgggcgacagagcaagactccgtctcaaaaaaaaaaaaaaaaaaaaaaagatcaagtctggaccgagactgagagttggaatccgagctctgccacttactggttatgtgacttgatgagtcacatcatgtgctttggcctcagtttcaccatctgtaaaactggaataataaccatgttataggagttaatctggagtccataagtatttcacccagggccccctcacacacaataagctcatgtcagccaggcacattggctcatgcatgtaatcccagcactctgggaggccaaggtggacagatcacttggggccaggagttcgagaccagcctggccaacatggtgaaaccctgtctttactaaaaatacaaaaattagccaagcttggtggcgaacacctgtaatcccagctacttgggaggctgaggcatgagaatcgcttgaatccaggaggcagcagttgcagtgggcagagattgcgccactgcactccagcctgggtgacagagcaagatcctgtttccaaaaaacaaaaaagagagaagcttcattcaggcatgaactactgtgctgttggctgtgaattcaaagttaatgaatgaacgatatctattcaggaaggtgtcttcaaacagaaacacacatagagcaaggttgtgtattgatcagttgattaaaattttgtgaccagagctgggtgtggtggtgcatgcctgtaatcccagctactcgggaggctgaggcaggaagatcacttgaggccaagagtttgaggctgcagtgagctctgattgggccactgcactccagcctgggtgacagagcaagatcctgtctccaaaaaaggttatgactggagattcacaggaacctaagcttaaatttcccctaggagcaacagtcttatagtcattaatttagtcttcaaagcagctttatagaatgtaacataactaataacaagatattggcaatatgctattctaagagcttcattgaccttctctgctccaacctacctatgaaggaggaactgttgtcatccccgtgtcacagagggagaaactgaggctcagagaggtgacatcacttgccgaagttctcacagagagaaagttgcagagctggggttttttttgttgttgttgtgtgtgtgtgtttttttttttttttttggagacaaacccttgctctgttgcccaggctgcagtgcagtggcgcaatctcagctcactgcgacctctgcctcctgggcttaagtgattctcctgcctcagcctctttagcagcggggattacacgccaccatgcccagctaatttttttttttttttttttttttttttgagacggagtctcgctctgtcgcccaggctggagtacagtggcgcgatcttggctcaccgcaagctccgcctcctaggttcacgccattcccctgcctcaggctcccgagtagctgggaccacaggcgcccgccagcatgcctggctaattttttgtatttgtagtagagacggggtttcaccgtgttagccaggatggtctcgatctcctgaccttgtgatccacccgcctcggcctcccaaagtgctggggttacaggcgtgagccactgcgcccagcctaatttttgtatttttagtagagacagggtttcaccatgttggccaggctggtcttgaacgcctgacttcaagtgatccttctgcctcggcctcccaaagtgctgggattataggcgtgagtcactgtgcccggtctgcagagctgggttttgaattcaggtagccaggccccagacctgaggctgaataaggaagagatgaaatggggaagtcagcgagaagtgggatcacctagcgtgtccaggatgggaaatgggggctcttggtgtacgaccctggtccacctggggcatccccctaccgccaggtcccttgccgatggaggccattgagaagatggccagcctgtgcatgagagacccggatgaggatgaggaggaggggacggatgaggacgacttggaggctgatgatgacctgctggtgagcactgagggcggggtgggggctctgatccggttgcccccatccagcaggcccttatatcctgccctggctgtgtgtccctgcaggcggagctaaatgaggtccttggagaggagcagaaggcttcagagaccccacctcctgtggcccaggtacagtttggatgactccactcccttgaaccacaacccaacggacagcccggggttcaagacctagccttttttatgagatggagtcttgctgtgtcacccaggctggagtgcagtggtgccatctcagctcactacaacctctgcctcccaggttcaagggatcctcccacctcagcctccccagtagctgggattacaggtgtgtgccaccacgcctggctaatttttgtattttttggtagagatggtgtttctctgtgttggccaggctggtcctgacctcaagtgatccacctgccttggcctcccaaagtgttgggattacaggcgtgagccaccgcgcctggcccacccttatccttcacagccatgtgacccatatcaggtgggtgacatgatgcttctgaaaccccattccctccactgggaaatggggaccatgatttctgcctcactggggcaggggaggctggtccagggatgacatggggccgactgttactgcagaaggggctaacaggggcatcccaagtggggtcaccacccacactgtgcccctgccctcccacagccgaagcctgaggcccctcatccggggctggagaccaccttgcaggagaggctggcgctctatcagacagcaattgaaagcgccagacaagctggagacagcgccaagatgcggcgctacgatcgggggcttaaagtaagtgggcagagggcagggtacagggaccccccgccaaccccgatgccctgcaccaagctcttggcttctcccaaaccaatactcacgccttatcttagacactggaaaacctgctcgcctccatccgtaagggcaatgccattgacgaagcggacatcccgccgccagtggccataggaaaaggcccggcgtccacgcctacctacagccctgcacccacccagccggcccctagaatcgcgtcagccccagagcccagggtcaccctggagggaccttctgccaccgccccagcctcatctccaggcttggctaagccccagatgcccccaggtaggtgatgggcagggccgggctgatatgggatccgagtgggccatctggcaggatgctgctctaggggggtgccggctgtgcactgattgtgagatattttcaacaccctgagtcctggggtcttcaagcccctggagttcatgaatacctcccaagcaggacatggatacccagagagttttttttgttgttattatgatattatgataaaatatagatcacatttgccattaaaaattattttagttcttttttttgagatggagtttcgttcttgttgcccaggctggagcgcagtggcacgatctcagctcattacaacctccacctcccaagttcaagcgattctcctgcctcagcctcccaagtagctgggattacaggcatatgccacacttggctaattttgtattttgagtagagatggggtttcaccttgttggccaggctggtcttgaattcctgacctcaggtgatccacccacttcggcctcccaatttgctgggattacaggcatgagccactgtgcccggctttttttaattctttgagacagggtcttactccatcacccaggctggagtgcagtgatgtgatcatagctcagtgtagcctcaacctcctgggctcaagggatcttccctcaccttcaccagtagctgggactacaggcatgcaccacacacttggctaattttttttttttttttgagtcggagtctcgctctgtcacccaggctggagtgcagtggtgcgatctcggctcactgcaacctttgcctcctgggttcaagcaattctcctgcctcagcctcctgagtagctggcattacaggtgcatgccaccacacctggctaattttttgtatttttagtagagacggggtttcactgtgttagccaggatggtctcgatctcctgaccttgtgatctgcctgcctcggcctcccaaagtgttaggattacaagcatgagccaccacgccaggcctcatcgccttttttttttttttgaaacagagtctcactctattgcccaggctggagtgcagtagcatgatcctagttcactgcaacctgcctcccaggctcaagcaatcctcccgcctcagcctcctgagtagctgggattacaggcatatgccaccgtgccccatgcccagctaatttttgtactttttgtagaggtgccatgttgcccaagctagaacatatcttctaagaggtttttcttcctaacctccccctaggaaaggaaggcctccctccctctctttgtgatatgaacacggggctttgccccaggtccaaacacttccctggcaggaagcaaagagacaactcaaaatactggcatgggtttgagaaagcaaacactgggtcactaaatccttctgcaaccaagctagtttccaagccattgtttttgacaaagttcaaggattactggaattgtcacctgaaattgtcaactgaaacgaccaaaaatttttcacaatggaagtttggcataaaacttgtcaggagttcaaagaatacaaagacatcacagtaacaaaattctgtgtcttccaatctatttgttaatgtgaagtaggtttctcaatactttaatttttttgagacggagtctcgctcttgtttccaggctggagtgcgatggcgtgatctcggctcactgcaacctccgcctcccaggttcaagtgattcacctgcctcagcttctcgagtagctgggattacaagcgcccaccaccaagcccggctaatttttgtatttttagtagagacggggtttcaccatgttgctgcccaggctggtctcgaactcctgacctcaggtgatccgcctgctccgcctcccaaagtgcggggattacaggcgtgagccaccacccctggcctcaacactttaaaaaagaaaaaaagtgcagatgtagtggctcatgcctgtaatcccagcactctgggaggccaggagttcaagagcagtctaggcaacatagcaagaacccatctctacataaaaattaagaaattagccgggtgtggtagtgcatgcctttagtcccagctcctcgagaagctgaggtgggaggttcgcttgagtccaggagttcaaggctgcagtgagccgtgatcgtgccactccaagtctgggcaacagagcaagatcttatctctaaaaaaagaaaaaacagaagaggattgaatgggagaaacgagttgattgttagggattggacccagctccaattatgtcagcaagaggtacatttctggtagaattttgctcttggtgtaccaaaactatcaaatagctcagcaggggctgggcgtggtggttcacacctgtaatcccagcactttgggacaccaaagcgggcggatcacttgaggccaggagttcaagaccagccctggccaacatggtgagacctcatctctactaaaaatacaaaaattagctgggcgtggtggtgcatgctggtagtcccagccactcgggtggatgaggcaagagaatcacttgaacccagaaggcaggggttgcagtgagccacgatcacaccactgcactccagtctgggcgacagagcaagactctgtctcaacaaacaaaccaacccaaaaagctcagctgggtgtggtggctcacacctataattccagcactctgggaggccaaggtgggaggatcgcttgaaccccggagttcgagatctgtctgggcaacatagggaaactgcgtctctataaaaaattaaaaattagccagccatggtggtgcatgcctgtagtcccagctacttgggaggctgaggtgggagaatcacttgagcctggaaggttgaggctgaagtgagctgtgattgcaccactgcactccagcctgggtgacagaatgagaccctgtctccaaaaaaataaaataaaataagcttgatgtatttacgttttgctcaattacatgctagtaataattataacaataattcaacccggaaaaacattgtttttaacaatgaaagatttataatcacaggaaataaaaccaatacaatgtcaaaggtgtgtcacttctacctccaaacatattttcagggaagtaagcctaagtttaaagcaatgggtccagttgttagtctgaaaaaaagatactgcgtgccattttctgggtgtttccagattttgcagacactgggtggtgtctttattgtactgtgttattttatactaagaattgcacttatagctttaaacattgaggtacttccccagaaaacatactgagcatattatttgaaactgtaactaacacactgtttaaaaagcactgaatactgggtttcctaactttgcaaacacactgcataaatatattttggttgtataaatatacaatagggtaggcaaaaaaggctttcaaacacacagctatatcatgttagcataaatttctgtgggggacgtggatggaaataagagaagactcaaaattcccaactgcttaaagtgagtcccaggatatatttaaaaagtgagttgggcatggtggcacatgcctgtaatctctgcactttgggaagctgaggtgggaggatcacttgagcccaggagtttgagactagcctggacaacatagtaagaccccatctctacaaaaaaaaataaaaaaccagccgggcatgcaggtgcatgctctgtagccccagctactcaggaagctgagatgggaggatcgcctaagcccggtgtctgaggctatagtgagcagcagagcaagactctatctctttaaaaaaaaatacattaaatatggccaggcacggtaactcacacctgtaatcctactttgggaggccaaggtgagcagatcacttgaggtcaggagtttgagaccagcctggccaacatggtgaaaccccgtctctactaagaatacaaaaattagccagaaattgggaggcggaggttgcagtgagccaagattgtgccactgcactccagtctgggcaacagagcaagacccagtctcaaaaaatacattaaagccaggcgcggtggttcacacctataatcccagcactttgggagtccaaggtgggcggatcacctgaggtcaggactttgagaccagcctggccaacacggcgaaaccctgtctctactaaaaacataaaaattagccgggcatgtgcctgtaatcccagctactcaggaggctgaggcaggagaatcacttgaacccaggaggcggaagttgcagtgagctgagattgcgccactgtaccccagcatgggcaacagagtgaggctctgtctgaaaaagaaaaaaaaaattaaataaataaataacaaatggtttacacggtgaacttggcccaggccctggaggcttcctgtatgttgttctcccttccaggtccctgcagccctggccctctggcccagttgcagagccgccagcgcgactacaagctggctgccctccacgccaagcagcagggagataccactgctgccgctagacacttccgcgtggctaaggtgcgtccagcctgacggacaggactggagggatggggcaggatgcttcccacgtggcctggtggcaaagcacccaaatttgcatcctagcttggtcactccctagcaatagtttgctgtaagtcttggagcctcagtttaccccctctgtgaaatgggcacgtgtgttggaagaggattaagcaagatggcacaaatggaagggagggagctagaagtcctcggtggcatggaagggcccggaggctccccacagggtccaagcccccaactgcacctcttcttctaatctcctcttccttctcccagagctttgatgctgtcttggaggccctgagccggggtgagcccgtggacctctcctgcctgccccctccacccggtgagaaccctgccatgcccactctctgggatggtttcaggcatacactaagttctccttgatgctgccacccctgttggtcaggcccagagaccaccctcaggccagaccagcttgtcgggggtgcagctaacaagcccctcattggcctggacctctctgtccccagaccagctgcccccagacccaccgtcaccaccgtcgcagcctccgacccccgctacggcgccctccacaacaggtaggttctgggaccctctggggttgggggcaggctggagccagactgtctacccatccgttgactcttaaccttgtccccctgtccggcccagaggtgcccccacccccgaggaccctgctggaggcgctggagcagcggatggagcggtaccaggtggccgcagcccaggccaagagcaagggggaccagcggaaagctcgaatgcacgagcgcatcgtcaaggtgccctgggggttccgggggaggtggggcgagtgggcagcccgggagccctcccacaggcagccctaacacctgtggccctcgcagcaataccaagatgccatccgagcccacaaggctggccgagccgtggatgtcgctgaattgcccgtgcccccaggtaggccttgcccctgtaggcctcgccccagtaggccccgcccccgtaggccccgcccccagaggccccgccgctggcaggctgtgccccaagctcctgttcctccagcctctgagccttggcagatgctattactccccatagcacaggctcagggagctgaatacaacatattcaagggttttgtaaacttgttaatcagtgggagcttgacattggacatgatgtgtctgcactgtagaaattggcaaaccggctggacgaggtggtcatgtctgtaatcccagcactttgggaggctgaggtgggaaaatcacttgaggccaggagttcaagaccagcttgggcaacgtggcaagaccccgtggctacaagaaatttaaaaattagcctggtgtggtggtgcacacctgcagtcccactctagatcatgccactgtactccagcctgggcaacagagcgagatcctgtctcaaaaaaaaaaaaattaattaattaaaaaaagtaaaggcccaagactctataggtgggagaggaatctgcatctccaccataatggtgtgagttggtctccatcctgacacacaataaccaggcctcgactggccacccaggcttccccccaatccagggcctggaggccaccaagcccacccagcagagtctggtgggtgtcctggagactgccatgaagctggccaaccaggatgaaggcccagaggatgaagaggatgaggtgcctaagaaggtttgagggttggggccgggcgcagtggctcacacctgtagtcccagcactttgggaatccaagatgggaggatcgcttgaggccaggagtttgagaccatcctgggccacacagtgagacccccgtctctacaaaaaaattttttaaaattagccaggcatggtgggactcacctgtagtccctgctacttgggagactgaggtgggaggatcacctgaactaaggagttcaaggctgcagtgagccatggtcatgccactgtacgccagtctgggtgacagagcaagacctcatctccaagacaattaaaaaaaaaaaaaagtgtttggtgagaattgcttgaaccgggaggcagaggttgcagtgagccaagatcgtgctactgcactccagcctggacgatacagtgatactctgtctcaaaaaagaaaaaaaaaaaaaaaaaggtgtttggggccaggggctttgagtgaggcaggggagtagcaaagtcctgggagcccactaaatgaccactgttgtcaccatcagaccctgatccttggggactggactcatcacaggcgctacgaaatctctaacatcctctctcttcctctacagcagaacagccctgtggcccccacagcccagcccaaagccccaccctcaagaactccccagtcgggatcagccccaacagccaaagcgccccccaaagccacatccaccagaggtaagttccccctccccgccccagctgcctgttgcctggctgtggcctgggcagcacccatagcagctcctatgcccacagcccagcagcagctggccttcctagagggccgcaagaagcagctcctgcaggccgcactgcgagccaagcagaaaaacgacgtggagggtgccaagatgcacctgcgccaagccaagggactggagcctatgctggaggcctcgcgcaatgggctgcctgtggacatcaccaaggtgaaccttctgggcttgtgggaactgcccaggcacccacttgtcaggctcctgccccttagcagccacgtgaactagaagtgtattagtcaaggtccagctgctgtaacaaataggtcctcccaagacaatggctgaaaggagacagacatttattatgtttcttgcatgtaccacccagggcagtctgggctctgcaaatgggaggtcctccagggcctgagtttcttccaccttattgctttgctgcacctgagggggttgtccttgtccacatgatccaagtggatcctgtcagaaggactagagaaagaggcagagctagtagtcccttttaaaggaagtgacatcactattgcttgtctcccattggccagaactaagtaacatggccacatttagccacagaggaggctgggacatgtagtctcttgttggtgcactgtgtgaccagcctgagctccattactagggaaggggaggggatcagatctggggagacacttagattctgccacttaggacaggaccattcctttttctctgagcatcatttttctcagagaagtggggatggccacccctgcctcaaagaaagacagccaggattcctcatgtgatagaatagtactcataataggaaacatttgaggagcttgaactgggcgcccagcaaaggccacccagtttaaggaagtgacatcacttttgcttgcctcccattggcccaaacagtcacatggctacatttagcctcagaggagcctgggacatgtagtctttgctggacactggagacatggccttgagcaaaaaaggcaaaaatccacactctctctggacatggtgggtcacacctgtaattccagctacttgggaggctgaggtgggaggattccttgaggccaggagctcgaaactagcctgggaaacacagtgagactcactgtcatggagtggatgttctaattgagagaccacaagaaacacacaaataaatacagcaccttatcacggcccatgaagactgcaccatctgccccatcagctcccttgcctggtctctttcttgtttttgttttgttttgttttgttttgagacggagtctcgccctgtcatccaggctggaatgcagtggcacgacctcagctcactgcaacctctacctcccaggctcaagcgattctcctgccttagcctcccgagtagctggaactacaggcacacgccaccatgcccggctaatttttatatttttagtagagatggggtttcactatgttggccaggctgggcttgaactcctgacctcaggcaatccacctgcctcgacctcccaaagtgctgggattacaggcatgagccactgtgcccggcctgccccttctctttcacccaccccctcgctcactcttccccttgctgtctggtagcctcaaacaccaggcactctgcaacctcagggcctttgcacatgcagttcccactgcctgaatgcttttcccacagacacctgtgtggttcactttctcccatcattaggtctctgctcagacatcacatctccaggaggcctaccctgagctgtctaaaatccctccctgtcacccagatccctctgctcctcctcccagctctgcctctccctgtggcatgtatcaccttctactctctcatatgatttacttatttcttctgattattgcccatctcccccaagagaatgtcagccccacgagggcagggattttgttctctcttcttcatccttgtgtccccagccccaaagcagagcctagcgcacagtaggggctccatacatgatttctcaaactcttgagctcaagcaatccacccgccttagcctcccaaagttctgggattatagacatgagccactgcacccggcaccatacatgatttctggggtgactgaaggatgcccttgttaaatgggacaatggaaggatcaagaagaaagaacagaggccgggcatggtctttcatgcctgtaatcctagcaattaaggaggccaaggccagcggatcacttgaggtcaggagttcgagaccagtctggccaacatggtgaaaccctgtctctactaaaaatacaaaaattagccaggtgtggtggcaggcgcctgtaattccagctactcaggaggctgaggcaggagaatcacttgaacccgggaggtggaagttgcagtgagctgagatcccgccattgcactccagcctgggcaacagagcgagactccatctcaaaaaaaaaaaaagaccagagaagggtgacagagccgtggtcagggaatgcccctcgtcaaggaagaatgacatttctgcagagccctaggtgggcctgcttgtcctccttacccccgccaccagcctcgtcctccccaggtgccgcctgcccctgtcaacaaggacgactttgccctggtccagcggcctggcccgggtctgtctcaggaggccgcccggcgctatggtgaactcaccaagctcatacggcagcagcacgaggtgagggggaggcccccagcccatcccccaggagcgtgaccctccttcccctctcttcccttccctcgactcactgccttctgtttccccagatgtgcctgaaccactcaaaccaattcacccagctgggcaacatcactgaaaccaccaagtaagtgccctgacctgtgccagacacttgcacccccagccacccatccccagggccagggacatgagcagggccctcccaccggcaggtttgaaaagttggcggaggactgtaagcggagcatggacattctgaagcaagccttcgtccggggtctccccacgcccaccgcccgctttgagcaaaggaccttcagcgtcatcaagtaaggctcctgatctacgccccaccacgtggccccagtggccctttggtggcggtggggcgggttgtgctccccagaagctggcacaagatttacatctggaagaaattttggataggtggaagagcacagagcatgcaaaggctctggggcaggcatgagatacaagtgaaggatggtgagggtgcagtcacagtgacgcatttgggaaagatctagagagtgcaaaggtgtatcttgtcccagggcctgggtgagtccacgggggaccagagatgagtcacggctttggtgggtgttagtcttggtactatcaagtcttcccatgcccagaggagcggggattgttttctccactttatttttatttttattttgagacagagtctcactctgttgcccaggctggagtgcaggggtgtgatctctgctcactgcaagctccacctcctggattcatgccattctcctgcctcagcctcccgagaagctgggactacagccgcccaccaccacgcctggctaattttttgtatttttagtagagacgggatttcaccgtgttagccaggatggtctcgatctcttgacctcgtgatccgcccacctcggcctcccaaagtgctgggattacaggcgtgagccaccactcccggccttttttaaaattttttttctgagacagtctcactttgtcacccaggcgggagtacagtggcgcaatctcagctcacttcaacctctgcctcccaggttcaagcaattctcctgcctcagcctcccaaatagctgggactacaggtgcccaccaccatgcccagctaatttttgtatttttagtagagacggggtttcattcagttggccaggctggtctccttaaatgatccgcctgccttggcctcccaaaattctggggttacaggagtgagccactgcgtccggcccattttctccactttctaaatgaggttaggtgcagccactagccctccggtggttcccagctgcccttgggataacccccaccccttaccctggctcccccatctccacacagcctggctccttgtcacctcttctctgcctcctgtccccgcttcactcagctttggccacaagggactctttttggtccctcctacaaacaaagtgtgttcctaccccaagcctctgcatcagctatttcttccgccttcaccctcttcctcaggtctccatgtggcagctccctcttgacatctagagtcacctatgatgtcaccttccctctaagaggccctccctatctatccgagcagtctcttctgagcacactccactctcccctctctgctgagttttttattgtttttctatttatgtacttatgctcatctgtccactcagctagattgagcacagggtatgggtatttacttctagatccccagcagctagggtactgactggcacatagtaggtgctcaagaaatattgtgaaatgaggccaggcgtgctggctcacgcctgtaatcccagcactttgggaggctgaggtgggtggatcacgaggtcaggagatcgagaccattctggctaacatggtgaaatcccgtctctactaaaaatacacaaaattatccgggcgtggtggtaggcgcccatagtcccaccttcttaggaggctgaggcaggagaatggcatgaacctgggaggcagagcttgcagtgagcagagatcgcactgcactccagcctgggcgacagagtgagactgtctcaaaaaaaaaagaaatattgtgaaatgaatagaaggtcccccagcaactaggacactagctggtgctttaataggactcaaaaaatattaagtgaggccaggctgggaggccaaggcaggcggatcatttgaggtcgggagttcgagaccagcctggccaacatggtgaaaccccatctctactaaaaatataaaaattatccagcagtggtggcgggcagctgtaatcccagctactcaggaggctgaggcagaagaatctcttgaatctgggaggtggaggttgcagtgggctgaggtcgtaccattgtactccagcctgggcgacagagcaagactctgtctaaaaaaaaaaaaaaaatatatatatatatatatatatatatacacgtatatatatgtgtatatatatatacatatatgtgtgtatatatatatatacgtatatatatgtgtatatatatatatatacacgtatatatatgtatatatacacacacacacacacacacacatatatattaagtgaaaagaaggtcccccagcagctggggtactggctggcacatagtaggtgctcaagaaacattgggaaatgaaggaaagatctcccagcagctagggcactggctgatgcttagtaggactcaacaactgttaagtgaagggaatatcacccagcagctagggtacctagcacacagtagataccaaataaatatacacagactgaagaaaagactcgaaagtgatccattgccaacctgaacagagaactctagtctgtctgattctaaaatgagcccaggagctgagacacccccgaaggccagggtggggtttgttccctgcccccactgggggaagagaaggcaggcgggcagtgggactgaggtgcctctgtttccctgcccacctgcctgcccacctgcccacccggaaggatcttccctgacctcagcagcaacgacatgctcctcttcatcgtgaagggcatcaacttgcccacacccccaggtgagggggctgtaggcaagggtcagggtcatggggaccccctctctgcccagctctgaccgttgtttgcccacaggactgtcccctggcgatctggatgtctttgttcggtttgacttcccctatcccaacgtggtacgtggggagctgaggaggggagggctgcagcctcagtgggccaaagccaggtcccaggccccctagatttcctgcctcctctctggtcataggaagaagctcagaaagacaagaccagtgtgatcaagaacacagactcccctggtgagcctcggctggaagcaccctacccctactcccttgcagcagaagggacataagacaatggcctgaccccacccaacttcctctccctccttcctcctgcagagttcaaggagcagttcaaactctgcatcaaccgcagccaccgtggcttccgaagggccatccagaccaagggcatcaagttcgaagtggttcacaaggggtgagctagagagagccatggccgctgggtgggctccaggggaggggagctcctctgaaccaaccatcctgtccccactatacacacatgcacacagggggctgttcaagactgaccgggtgctggggacagcccagctgaagctggatgcactggagatagcatgtgaggtccgggagatccttgaggtgagaggtggacattcatccgcgtgctccggtatggccatgctactcgttaacattattaaaacacttcctgccttgagccctctatgagcctgtctgttgacccagcccctcccctcagagcctcagacctccctactgcccagccctaaatacttgcagtaccccactccattatgatcaactggtatctcagccataccatgggctcatattttagaaaccactcttggccaggcatggtggctcatgcctgtaatcccagcactttgggaggctgaggcgggcagatcacgaggtcaggagatcgagaccatcctggctaacatggtgaaaccctgtttctactaaaatacaaaaaaattagccaggcatggtggcgggcgcctgtagtcccagctactcgggaggctgaggcaggagaatggcgtaagtaaacccaggaggcggagcttgcagtgagcccagattgcaccactgcactccagcctggacaacagagcgagactctatctcagaaaaaaaaaaaaccaaaaaaaaaaaccagtcttgttctcccttgtcctggccctgggcctctagtcacttcctgcttcccaccaacagtttctccttacccccacccaggtcctggatggtcgccggcccacaggggggcgactggaggtaatggtccggattcgggagccactgacagcccagcagttggagacgacgacagagaggtggctggtcattgaccctgtgccggcagctgtgcccacagtgagaccccccacccccacccatcagcaaccccagggagggaagcttggttcaggggcccaggactcacaggactggttctctcctctgaagcaggttgctgggcccaaagggaaggcccctcctgtgcctgcccctgcaagggagtcagggaacaggtaggtatctgggccagggcatgctggagaaaacacccaattcccctctcagccccacctggacagtttcccaccaggcacaaattggaccacgtccctctcctgctgcaaaacctttcttggcaccccttttcccagaggatccagtttaaactccttggtttggtctttaaaaccttttgtgatctgaccattgtcaacatatccaggcttctctctccctactccctcctgtggttcatgtccatgaatagttttcactggcctctggacttctgtgggttccagtgccctgaacacccctacctagggtaggggtgttccttgttcctctgcccacctctgattccttctttggatcccaacttggctgttacctcctccaggaagccctccctgaccactaggcatcatagtttcctgggtgtgcagccatcatccccgctaggttttgggatcagtaacaccgggtggttctcggctgtctcccaccatacccccagtgcccagtgtgtcttttttttttttttttttttttgagacagagtctagctctgtcgcccaggctagagtgcaatggcgcgatctcagctcacagcaacctccgcctctggggttcaagcgattctcctgcctcagcctcctgagtagctgggattacaggcatgcgccaccacacccagctaatttttctatttttagtagagatggggtttctccatgttggtcaggctggtctcgaactcccgacctcaggtgatctgcctgcctcggcctcccaaagtgctgggattacaggcatgagctaccatgctcggcttttttttttttttgagacagaatcttgctctgtcacccaggttggagtgcagtggtgtgatctcggctcattgcaacctccagctcccaggttcaagcaattcttctgcctcagcctcccaagtagctgggactacaggagcacaccaccatgcccagctaattttttttctatttttagtagagacggggtttcaccatattggccaggctggtctcgaactcctgacctcatgatccactcacctccgcctcccaaagtgcagggattacaggcgtgagccactgtgcccagcccagtgtgtcttttgaattaacagggttgggctgggggaatctctgcagtcccttatccttcctccaccccttagatcagcccggcccctgcatagcctcagtgtgctggcgtttgaccaagagcgtctggagcggaaggtgggtatccatcctgccgggctacatggggcaggactggggagtctgcaggcccaggcaggatcctcacaggaccctctgtatcctctagatcctggccctcaggcaggcgcggcggccggtgcccccagaagtggcccagcagtaccaggacatcatgcaacgcagccagtggcagagggcacagctggagcaggggggtgtgggcatccgacggggtaggggtttggagatgggcatctggtgggggaggagctccaggataggcatggggggggaggtgctcagggatgcatatctggtgggggaggggctcggggatgggcatctggagagggaggggctcggggatgggcacctggagggggaggggctcggggatgggcacctggagggggaggggctcggggatgggcatctggagagggaggggctcggggatgggcacctggagggggaggggctcggggatgggcacctggagggggaggggctcggggatgggcacctggagggggaggggctcggggatgggcacctggcgggggacgggcttggggatgggcacagtccaggagggttgtgggcagtgaggccccaccctaagcctccattcccccgccatccattctcagaatacgcagcccagctggagcggcagctgcagttctacacggaggctgcccggcgcctgggcaacgatggcagcagggtgagctggtcgcgggccgggtgggcactgggcagcgggcagggtggggcctgcagggactacctgctgaatgcccatcccccacaggatgctgcaaaggaggcgctctataggcggaatctggtagagagtgaggtaagcagcttaggagatggggtggttgggggatcactgtggtcgtagcccacctccatgaccccagtggcctcctctcccccagctgcagcggctccgcaggtgaggagcccatggggcgggcagcccccagaaagcgggcagcaggccccgataccgggaagagccgacacagccacgaaccagacaagcagacaatcagcggacaatcggttctggactcacccctcatccgggcccccagccccgccagagcctccgtggctgcgggtgttgggaaccatgcctgccagccagtatgtgcccctcacccaggcctggctgggccctggagagtcctgtttgcacagcccaggggtgtccggcctctggcccgccccggagcagggagggtggctggggccaagccccgagggcccctgcaagcactttacttcctgttcctccccagccttaaccccaaagccctcctgcaccccaaagaagccactgaggctggccgagccacactgtctccccaggggcgtcgacctggcccagctgggtccccagggccagcacatggaataaaatagccagggccacactcagcccagctctgtcctgtctgtttcttgctcagaccctcggtggccaggctaggtcttcccacccaccccccggttcccctggaagtggatggggaggcgcctgttagggaagcagttttggggagggacagtgtgcttgtgaaaggtgctttttttttttttttttagagaccgggtttccctctgtcacccaggctgcagcgcagtggcacaatcagctcattgcagcctccgactcctgggctcacatgatcctcctgcctcagcctcctaacggattacagaagggcaccaccacacacccagcttgaaggatgcatttcattcccatgcttgctgtggggggggatacatgtgagggtccctatatctgtcacccagtgttttttcagtgggtggccttgggcgtccctgcaatcacacgtggctaggtcgcacagggtgctgtttggtgaccccagtgtgtgcctcaagacctcaaaattcagtcctgacccacttagcatcccagagcctcagtttccccagctggactggttgtggggaggagtccgtggacagagcccccaaagggtgcctggtccgtgctgagtgctggaagggtttggctttattgttgctgcctccatctgtgttgggagtttggggtagggtgtgtcccgccaggccggcgtggtctgtgagcctggagtatgccagctgtgtgcctctgtgtctcggccagtggcaggcagagcaggcccagccctggaggcccaggagagccagaccaagggcccctggtgggcgttgtctcctcagtccacggcccagcggagtcccaggagtctgagctgctctgctgggcctctctaggatcaggggccccctgcccgtggcccacgtggggtggtgggaggcagccggatcaggacctgctccggattccctgccgtgtccaccacacgcaggtttgggagccccaggaaggcctcagccgcgatgctcgtcatgtgaagcctgttggccctgcacagagaggcggtcatgaccctcccaggccctcccctgcccacctccacccctccggtcaccctcggggcacctgaggaagagggcacgcaggcggggtgtgctgaggaaggcctcggggcccacgtggccgatgcggttgccctcgaggtgcagctcctctagggcctcaggcaggtccgggggcacaaaggacagctcattgtggctgaggtccagcatctgggcagggggttatagatggcatcgtggcagccccaggcctgggccactcagctcagccagcccccaacctctctgagagtcccctgcccccttcataccagcctggcccttctgccccccaccccccatgattgccaaattcctcccttctgcagaggtaaactaaggcccttcccaggaaggcacagacagacaggtccccacttgattaaatgagtcagtcattgaatcgcaccatacctctttcatcactttttttttcaagagacagggtcttgctctgttgcccagtctagagggcagtggcccgatcacggctcattgcagcctcaaacttctgggctcaagcgatcctcctgcctcagcctcctgaatagctgggactacaggcatgtgccaccacgcttggctatgtttttttggtagagatagggtcttgctgtgttgccaggctggtctcaaacccatagcctaaagcgattctcctgccttggctccccaaagtgctgggattacaggcatgagccacctcacccagcctcctcatcaccttctaacccactcttatcattttcttgttctgattgctttaccagctaactagaatgtttgggacgtggcagggcaggcagggggatggaggggccctggggacagtgtggctaaccagcctgtgcctgacctggagggcttggagctcatgccaggtgcctggcccgatgtcgccgacccggagccggttgtgcgccaggctgagctcccgcagttggtccaggccggccagaggctcgggctcgagcatccgcagctggttgcgttgcagctgcagggtgcgcaggccagtgggcaggcccatgggcagccgggttagctgattccctgccaggtcgaggctgcgcagggcacgcaaccggcggaaggcccggtggtgcacacgggcgctggccaggcggttataggccaggttaagctccgtcaggcccggtgtggcgaccaggtcacgggcacccagcgcggccacgtggttgtggggcagcaccagggcacgcaggcggcggggcagggctggaggcacgcggtccagcccattgccatagaggtgcagcgtgtgcaggccccgcagcggccgcagagccccggcgggcagccctgagctccccagctggttgtgctgcagcaacaaatagcgcagaccacgcgccccgtgcagccgagccgcctccacctgccggatgcggttgcggcccaggtgcaggatagccagggtccggggcaggccggcgggcactgtggtcagctggttgtgggagagatccaggtattcaaggctatgcagcttgctggaaggagagagggtcggtgttaggtggggcacttggagtggggtgcctgacagattttggcggggaggctggggagtggtcctgagacagatttaagctggagattttgacttgggagtgatgcgtggagagagctgggtgggaggtaaacttggggtgcccagggcagattccagcctgagagttagctatgggggtgaccagggtagagccgagatggaaaggcatgtgagacttacgatgtcagtgcagggctgtggggaacagggacacctacccagtgctctgccgagcccagtgagcagcaggcactcagtaaatgaggccgtggcttaggagccagtcagggaagggggactgaaggttgggacccccgactgtaaattctcagcccctgctgccccccaaccagcctgtacctgaaggtggtggcatccaggccactgtctgtcagctggttgtgctggaggtagagctcacggagttgagtctggcggctcagggctcctcggggcaccttggagatgagattgttctggagaaggaagaagagaatgagacttgagtctgggatgagggcagcgggaagccacagacggctcttgagtaagggagtgacgaggagcttgccttgagctcaaagcgatttccaataaagtgattcaaagaaggataactctgaccactggcattctgaggggcaattgagaagaatggaaagctaggaactggaggggtccccctggaaagaggtgaagagagtctggcccggggtgggacctacagcagggctacctgcaggtggagccgctcgagtgagggcggcaggctgggcggcaggtagctgagctggttgttggagaggctgagggtggcgatggcctcggagccgcggaaggcgtcggggggcaggccagcgttgctcagctggttgttgtggaggtacacggacctgaggagagccaggctccggccaccagcctgcccctcgcctcctaccaccccactcccgcaccacaccctgctcagggtcgccttcagtgtgtgtgtgtgtgtgtgtgtgtgtgtgcgcgcgcatgtgtggagtctgtgtgggaatgtaattgtgtatgtgtgcatgtgactgtgcgtaggtgtgcaggtgagtgtgcatgtgtgttgtatgaatagacgtgtgtgcatgtgtgagcagtgtgcatgtgtaagtgtaatgagtgcatatgtggagtgtgtgtgcacgtgtgtatgtgattgtaagagtgtgtgggcgtgcatgtgtgtatgtatatgcaagtgtgtgctatgtgcctgtgcataagtgtgcatgggtgagtgtgtgcatgtgattgtaagtgtgggtgtgcatgtgtgcatgcctgtgcataagtgtgcatgtgattgtgtgtgtgcagccgagtgtgcaactgtgtgtatgcatgtatgtccatgtgtgcatgtgatcatgtgcaaaagtgtgagcattgtgtacatatgtgcatgtgtgtgcttgtgtgtgcatgtgattgcgtgtgcatgcatgagtgtgtgcctgtgtgcatgtggttggaagtgtgtgcaggtgtgtatgtgagtctgtgtgtgtgcttgtgtgtgcatgtgattgtgtgtgcatgagcatgtgttcatgtggttgtgtgtgcaggtgtgtatgtgagtctgtgtaagtgtgtgtgtgtgtgtgtccctgcacatactgtctccacctcagtctggagttctgacacagcatacagggccctgtctccccgctcactctcctcccagggtagaactatgccctcttcccactccccaaggctagggatctgtccctggttaagccctccagggcaaggcattttgtttctgtttttgtttttaattttgagacagagtctcactctgtcgcccaggcttgagtgcggtggcacgatttcgtctcactgcaaactccacctcctgggttcaagccagtctcctgcctcagcctcctgagtggcggggattacaggcgcacaccaccacccccagctaatttttgtattttaagtagagacagggtttcatcatgttggccaggctggtctcgaactcctgaccccagatgatcctcccaccttggcctcccaaagtgctaggattacaggagtgagccactgcacccggccgagggcaaggtcttaactccctcattgctcctagaaccggggcatgacacagatgtatctgaggcctgggggcctgggctgggccagggtctacctgagtgccggcttctccccaaaggtgagggggaagatctccatcacttggttggcagccagatccgcgacacggagggaccggggcagaaactgaggggccactgagagctgtggggacacagcccacagccggactggtcctggtgcgccttggccccaccacttccccagcagagctgtcccctccacaccctgggctgagtgactgaagctgcaccctcactgggctcggcctgcgggtggggctgggggctcaccttgttgtgagccacgcagaggtgctgcagctgggtgagggactcgaaggcctcgtcaggcaggcctgggagagtaggggggcagtgaagggaccccaggcctgtcttgggtggagggggagtctgggctcccagctgccccaggactctcggccggggaactggcagaggctccccaggccctcagatcccctcctccccatccctactcaaaagccacagcccccaacccccaccccagctcctgagtttccatcctgctcagcaaagggcagttctgggaactgccacagagctgcccgcagatggggcgggggagggggatggcagctgagacctcggtcagtcctacagccccagagaggccgcctccctctgccccctcaccttcggaggagatgaggttgttgtggaggttgagggttcgcaggccactgaggcgggacagctcattgtaggggagttcctggagctggttgttctgcagggtgagagttggggtgttcacacccgtgaccccgtgaccaagtgaccccaagcactgattctcaacttcccatcagcccaaaccagccccataccatcatcacccccacagttaatcccaaacaccccatcactctgacccagtcttataactgccaagatgtcaaaccccaaacccccacaatcgaccccaaatgtgccatcacccccacaatcgaccccaattcccccaacacccccacaatcaacccaaatgtgccatcacccccacaaccgaccccaaatgcaccatcacccccacaatcgaccccaaattcctcaacacccccacaatcaaccccaaatgtgccatcacccccacaatcacccccaaatgcaccatcacccccacaatcgaccccaaatgccccaacacccccacaatcgaccccaaatgcgccatcacccccgcaatcaaccccacatgccacaacacccccacaatcgaccccaaatgcgccatcacccccgcaatcaaccccacatgccacaacacccccacaatcgaccccaaatgcgccatcacccccgcaatcaaccccacatgccacaacacccccacaatcgaccccaaatgcgccatcacccccgcaatcaaccccacatgccacaacacccccgcaatcgaccccaaatgtgccatcacccccgcaatcaaccccacatgccccaacacccccgcaatcgaccccaaatgtgccatcacccccgcaatcaaccccacatgccccaacacccccgcaatcgaccccaaatgtgccatcacccccgcaatcaaccccacatgccccaacacccccgcaatcgaccccaaatgcgccatcacccccgcaatcgaccccaaatgcgccatcacccccacaatcgaccacaatgcgacatcacccccacaattgaccccaaatgcgccatcacccccacaatcgaccccaaatgtgccatcacccccaccatcaaccccacacgccacaacatccccataaccccaaactccccatcacactaactccaaacaacactataaccgccaagatgttgaccctaacaccactaatcctcagtccccgacaacttccagcatgtccacgctcacccctctcatcttgggcatgcagagccaatctgccaaggcaaagctccatcacagcctgctctgcaccgccctcctgcaagtgtgttcctataccccaccacgctcctcagctctggggcacccctccagctcccctcaccactgggtctcagccctgcatgcccccactcccctccgtgggccccacctgcagggagaggtgctgagcggctctggtgatgttgtccgggaacactcgaaggtccaagccatcacagtccacagtgtcgactcgggggcaggagcagcgcaggggacaggcccggggcaggggctgcaagctctcccccaggtgggggaaggcagcgtcttccaagccggcgacgggcgggggccccggcaacagcaggagcagcagcaggctcggccactgcgggggagggagggtcagcgtgtctccaggctgggcgcagggtcgccatggtgactggagcatcccctcctcggggagggtcttggtggggaggcagtggccagttggcagagcaggggtgggggggcaggcaggccccaccctcagaccctcccgtgccccaccttaccatggccagccctgactctgccatctcgcccaagctgctgaccaggacttcctaatggaaaccaggcggtcacctcctggagcctctgctgtggccaccaccgccccccatctccagacccatgccaccccccacaacagcctgttctcccggggctttgggggagctggcccacccccttccccgccctggggaggacgggcaggcggccggatggggtggtgaggacaggccagcccgtccccttggtcccccccaacaaccaccccatctctgctttcgtaacctcagccagcctgggccgggccacaagaacaaggaatgtttggggaaaagctgagattcgtcctgtctggtatttgggacgaccgcaggagtaggggtggggatggagggatggggggagcttcggggcacaggagagttccgagaagcaggggcgggcagcagcgagggattagggaggcctgagcttagcctggcagcccagatgccagcctgggagctcctgaccaggtctgctgcccggcacccacctcccctctgctggctggtcttgctccagacacccgccccctcctccccccgcaaatggccacagccgcctggaaggaaattacatatatccaggcatcagcctggtggttaagagtgtgagcttggtgccagcctgcctgggtttgaacctgggctgtgccacctctcagggccttggtttccctttctggggtaatggttggctcaccaccccacactcccccacagtgttgtaaggattatacgaagtgtgcattcagaacagtgcctggcatatcccagggctttggcacccgtggatgggggtgacaagctggtctccacatgaggtcaattctcccagacccacaacttaccaacagggcggcttcagacaggtccttctcctgcccagacctcagctttcccacacataaaatgggattgacaggctgggtgctggggtttatacctgtaatcccagtgctttgggaagctgagacaggaggatctctcttttgttttttgagacagagtctcactctgtcactctgtcgcctaggctggagggcagtggcgtgatctcggctcactgcaacctccacctccggggttcaagtgattctcccgcctcagcctcccaagtagctgggattacaggcgcctcccaccatgcccagctaatttttgtatttttagtacagacagggtttcgccaagttggccaggctggtctcgaactcctgacctcaggtgatttgcccaccttggcctcccaaagtgctcggattacaggcatgagccaccacatctggctagaaggatctcttgaggccaggaatttgagaccagactgggcaatatagtgagaccctgtctctaaaaataaatttaaaaaaaaattagcctgggctgggctccatggctcacacctgtaatcccagcactttgggaggcttaggcaggcggatcacctgaggtcaggagttccagagcatcgagcccaacatggtgaaatcctgtctactaaaaatacaaaaattagctgggcatgatggcacgtgcctgtaatcccagctactccagaggctgaggcacgagaatcgcttgaacctgggaagtggagatcacatcactgcactccagcctgggcaacagagcaaaactctgtttcaataataataataataataataactaacctggtatggtggtgcacacccacagtcccaggtactcaggaggccaaggcaggaggaacacttgagcctctgggctcaagtttgaggttacaatgagctatgtgccactgcacgccactctgggcaacagaataaaaccctgttattaaataaagaaaaaaaaagtggggggatgacaaaccccccccctcaaagagctgtcttgaagcagaacgaggcagtgggtagaacattttaagaatggtggctgggtgtggtggctcatgcctgtaatcccaacacttttggaggctgaggcaggaggatggctctaagcccaggagtttgagaccagcctggtcaataatggtgagacccccgtctctaaaaaaattttttaaaaactttgtggggggccaggcgcggtggctcacacctgtaatcccagcactttgggaggccgaggcaggtggatcacaaggtcaagagatcgagaccatcctggctaacactgtgaaaccccatctctactaaaaatacaaaaaattagctgggtgtggtggtgcgcgcctgtagtcccagctactcaggagcctgaggcaggagaatcactagaaccagggaggcggaggttgcagtgagccgagatcacgccactgtactccagcctgggtgacagagcaagactccgtctcaaaaaaaaaaaaaaaaaaaaacttagcgggggccaggcgcggtagctcacacctgtaatcccagcactttgggaggccgaggtgggcagatcagctgaggtcaggagttcgagaccagcctggccaacatggcgaaaccctgtctctactaaaaaatacaaaaattagctgggtgtggtggcatgtgcctgtaatcccagctacttgggaggctgaggcaggaaaatggcttgaacttgggaggcagaggttgcagtgagcagagattgtgctactgcactccagtctgggctatggtgcgagactctgtctcaaacaaaacaaaacttagcggggcatggtggtgttgcctgtagtcccagctaccagggaggctgaagtgggaggatcacatgaacccaggaggttgaagctgcagtgagccgtgttcatgctactgtacaccagcctggatgacagagtgagaccctgtctcaaaaatgaatgaataaataaaaataaaagtatagtgtcggccaaggacggtggctcacacctgtaatcccagcactttgggaggccaaggcaggtggatcacctgaggtcaggagtttgaaaccaacctggccaacatggtgaaacccagtctctactaaaaatacaaaaatttcctgggcacggtggtgcatgcctgtaatcccagctactcaggaggctaatgcaggagaattgcttgaacctgagagctggaggctgcagtgagccgagatcacaccactgcactccaggctgggtaacagtgagactccgtctcaaaaaaaaaaaaaaaaaaaaagtatagcgtctgctcagcttgggagtggccaaggccaggagttggagtctcccagaagcagagcttgagacaaggattgagtgcatttattccagagaaggcaggcagtgatacaggggagggaggaagtgatcaagaaacagtggctgggcgcagtggcccacgcctgtaattccagcactttgggaggctgaggtgggcagatcacctaaggtcaggagttcgagaccatcctggccaacaaggtgaaaccccgtctctactaaaaatacaaaaaaattagccaggcatggtggcaggcacctataatcccagctacttgggaggctgaggcaggagaatttcttgaacctgggaggtggaggttgcagtgagccgagattgcatcactgcactccagcctgggcgacagtgcaagactccatctcaaagaaaaaaaagttaagaaacatgggccaagagaggtggttatctgttcatgtttcctagggctgtgtgacctcctgagggtctctcttcatggggtgagacaggagacgggtcttagtttaggccagaagagaacaacagctcctatctcaagtactccccatgggatggatggccattagcttggacattgggtggaagttcctcagtctcttcagcagtgtaatggggctaaccctagggagacaggactactgtagcagtcctagcccccagggaagcagcaataagaaccaagatgtttgagttccgggcaagcctctttccattgcaaaggaaggagaacccaaactgaactagctaatacaaacaagggcatttactggctcatgaacagaaaacctgtatccttcaggcacagctggatccaggggctccagtgatctcttctagatgaattctctcttgaactctgaactctacttgcaggcttctgtatgtggtgctaagacattcccagaaccaataagcattcttccctggctttagtagaaagcctcagacttaaatctcattggcctaaatttggtcacatgtccatccagagccaatccctggggccagagggatggaatgtgctgattggctaggaacctaaccattgttcctgtaaataacccactggccttatcttcctgcaacaaactccccttctgccacactgtcctgtccagtcctgcctggtcctgcccagttctgcattacccagcaggggcctctgcagggataacaatggagtatggtccatcaatgtggccccagtgtccagcatggagcctggtataatcagtatttagtaaatatttacagaatgcacataggattggctgtgcgcccctgtggctcacacctgtaatcccagcactttgggaggcagagacgggcagatcatgtgaggttgggagtttgagaccagcctggccaacatggtgaaaccccatgtctactaaaaaatacaaaaaaaaacaacaaaaaaaattagctgtgtatggtggtgcacacctgtaatcccagctactcaggaggctgaggcaggagaatcgcttgagctcaggaggcacaggttgcagtgagccgcgatcacaccactgcactccagcctgggtgacagagcaagactctctctaaaaaaagacagaaagggccaggcacggtgtctcatgctgtaatcccagcactttgggaggctgaggcaggcggatcacctgaggtcgggagtttgagaccagcctgacaaacatggataaaccccgtctctactaaaaatacaaaattagccaggcatggtggcacatgcctgtaatcccagctactcaggaggctgaggcagaagaatcacttgaacctgggaggcagaagttgtggtgagctgagatcgcgccattgcactccagcctgggcaacgagagtgaaactccaaaaaaaaaaagaagaaaaaagaaagaaagaaaaggaatgcattcacagttctggaggctggaagtggttccaggcaacttggtgtttcctggcttgtggctgcatcaccctaatctctgcctcagtttccacgtggccttcttcactgagcctgtttctcctctcctgtctttatttatttatttttgagatggagtctcgctctgttgctcaggctggagtgcagtggtgtgatcttgattcactgcaagctctgcctcctgggttcaggccattctcctgcctcagcctcccaattagctgggactaaaggtgcatgccaccacgcccggctaatttttttgtgtttttagtagagacggtgtttcatcatgttagccaggatggtttcgatctcctgacctcatgatccacctgcctcagcctcccaaagtgctgggattacaggcgtgagccaccgcgcccagcctctcctctcctgtcttttataaagacactggtctttggattcagggtccactcagttaatctgggataatctcatctcaagatccttaactgaattacatcgcaaagacctgttttccaaatcaggtcacattcacggcatcggggagacaggacatctacctatctatttgagggacaccattcaaaccacgacatggatttacctgggtagagataatcttgtgggaaaaaaaattgcagaatgatgctaacaatgtagatcatttccatatattaaaacatacatattggctagctctggggggagacctgaatgcttgtggctgggggcaaagagaggcttgccactggatatccttgtacatctgtttttgttttgttttatttattaaattaattaattaattaatttttttgacagagtctcgctctgtcacccaggctggagtgcagtggcgcaatctcggcggctcactgcaagctccgcctcccgggttcacaccttctcctgcctcagcctcccgggtagctgggactacaggcacccgccaccatgcctggctaaatttttttgtatttttagtagagacagggtttcaccgtgttagccaggatggtcttgatctcctgacctcatgatctgcctgccttggcctcccaaagtgctgggattacaggcgtgagccaccacacctggccctatttgtttattttgagacaaagtctctctgttgcccaggctggagtgcagtggcgggatctttgcttactgcagcctccgatccctgggttcaagcgattctcgtgtctcagcctcccgagtagctgggactacaggtgcaggccatgatgcctggctaatttttgtatttttaatagagacaggttttgccaagttggccaggctggtttcaaactcctgacctcaatgatccgcccgccttggccttccaaagtactggattacagatgtgagccactactcctggcctgtttggggttttttttttgtttgttttggggtttttttgagagggagtctcactctgtcacccaggctggagtccagtggcacgatctcggctcactgcgacctctgcctcctgggttcaagcaattcttctgtctcagtcttcccagtagctaagactacaggtgtacaccaccatgcttggctaatttttgtatttttattacagacaggattttaccatattggtcaggctggtcttgaactcctgatctcaggtgatccacccaccttggcctcccaaagggctgaggttacaggcatgagccaccacactcggcctgttttattttgttttttaagagacaggagctcgctatgtttcccagtctgaactccaactcccaggctcaagcaatactcctgaatagttggggccatgggcatgcaccactgtgccctgtacatctgttgaattaaatagcaaaaaagttgagcagggtgcagtggctcacacctgtaatcctagctactcaggagcctgaggcaggaggaacacttgaggacaagagttcaaaaccagcctgggcaacatagtgagaccctcatctctaaaaaaaaaaaaaattcagaaaattaggttgggcaaggtggctcacggttgtaatcccagcactttgggaggtggaggtggaaggattgcatgagcccgggagttcaagaccagcctgagaaacaaagtgagaccctgtctctacaatttttttttttgaaatggagtctcactctgctgcccaggctggagtgcagtggcatgatctcggctcactgcaacctctatcccccgagttcaagtgattctcctgcctcagcctcctgagtagttggaattacaggtgcctgccactgcgcccagctaatttttgtatttttagtagagacacggtttcaccatcttggccaagctggtcttgaactcctcaccttgtgatccacccacctcagcctcccaaagtgttgggattacaggcgtaagccactgcacctggtgttgtagaggcaggagaatcgcttgaacctgggaggcagaggttgcagtaagccgagatcacaccattgcactccagcctgggcgacagagcgagactccattaaaaaaaaaaaaacaaactttttaattagctgggcacagtggtgcatgcgtgtagttccagctccttgggaggctgaagtgggaagactgcttgagcctgggtggagtgccactgcactccaacttgggcaacagagcaagaccctgtttctaaaaaagaaaagaaaggaaatggtggatacacactgctaacttcaagggaggatgagaaacaccatctttctactgggaagccacatgttcagataaaaatggagtttcttggctgggtacagtggctcatgcctgtaatcctagcactttgggaggccgaggtgggcggatcacgaggtaaggagtttgagaccagcctggccaacatgatgaaacccgtctctactaaaaatacaaaaattagccagacgtggtggtgggtacccgtaatcccagcttacttgggaggctgaggcaggagaattgcttgaacctgggaggcagaggttgcagtgagccaagatcgagccattacactccagcctgggtgacagagcaaaactctgtcttggaaaaaaaaaaaaattgagtttctatcactactgcataaaagtgggatgacctgtaaaaaggaagcaatgaggagttaggaccacaaggaaaattgagcccaaggctttctgtgttcaaagccactggtctccaaagttgggtgtgggaaatgaatcataatttctagttctatttacctgccccatcctgttttatggcccttttccaggtatgatttaattcacaggctagaaagagtggtctaaatgcacctgtatagttgggttatttgtaaacaaatacatatacgtattaagggagagtccaagtgacgaacgatcagaaatatgggaaatcttggctaggtgcagtggctcacgcctgtaattccagcactttgggaggccgaggtgggcggatcacgaggtcaggagatcaagaccatcctggctaacatggtgaaaccccttctctactaaaaacacaaaaattagctggccgtggtggtacgcacttgtagtcccagctactcgggaggctgaggtgggagaattgcgtgaggctgggaggtcgaggctacagtgagctatgatcacaccactgcactccagcctgtctcaaaaaaaaaaaaacacaaaaaaacaaaaaaaaaacaccataaaaacacctttataataattgttgtaggcggaggtttcagtgagccaagattgcaccactgcactctagcctgggtgaaagagcaagactccatctcagaaaaaaaaaaaaaaaaaaaaaaaaaaaaggctggccatggtggctcatgcctgtaatcccagcactttaggaggccaaggcaggtggatcacctgaggccaggagctcaagaccagcctggtcaacatggcgaaaccccgtctctactgaaaatacaaaaattagctgggcctggtggtgcatgcctgtaatgccagctatttgggaggctgacgcaggagaatcacttgaacccgggagacggaggttgcagtgagctgagatcgcaccattgcactccagcctgggtgacaagagcaaaactccacctcaaaaaaaaaaagaaaaaaaaaagaattgaggtaaattgcaggacatcatgttggtgtccaccaagaattggggaattacttgatttgggagaagctgccccatcatctggtgtcagaagcgaaggattgagagtgatgtgatatagaaggaaaaacagtctgtttgtcccatgtacgtattcaactgacttgggccaaactgacttctccctagtcttcctcatatcaaaaaatggcactaacattttgctaaatattccactcagatgctaaagtcatcattaacttctctctccttgcccctatcccaatatcttgtccttgaaaatgaccccatcggctctgactatggccacttttctccattttctttctttatttttattattatttctgagacagcgtctcattctgttgcccaggctgaagtgcagtggtgcgatcatggctcacttgcagccttgaactcctgggctcaagcgatcctctcacctcagcctcccaagtagctgggagtacaggctcaggccctcatgctaatttctaaaatttttatagagatgggatctcactatgttgcccaggttggtctccggggatcaagggagactttaagcaatcctcccactcaagccatctcctgccttggtcttccaaagcactgagattacaggcgtgagccaccacggccaatattctccattttcttttcttttcttttctttttttttttttgagacggagtcttgatcagtcgcccaggttggagtgcagtggcgcaatctcggctcactgcaagctctctgcctcccaggttcatgccattctcctgcctcagcctcctgagtagctgggactacaggcgcccgccaccacgcccggctaatttttttttttttttttgtatttttagtagagacggggtttcaccatgtttagccaggatggtctcgatctcctgacctcctgatccacctgcctcagcctcccaaagtactgggattacaggtgtgagccaccatgcccggccgtattctccattttcaatgctagtagattaatctaagtcagcatcacctaccctcctggctcccccaagactattcctgcccccatcctcatcccccaagaccattctgcacatagcagtcataataacatcctcctggccgggtgtggtggctcacgcctgtaatcccagcgctttgggaagccaaggtgggaggatcacgaggtcaggagatcaagaccatcctgaccgtcctggctaacatggtgaaaccctgcctctacaaaaaaaaaaaaaaaaaaaaaaagccaggcatggtggcaggcgcctgtagtcccagctacttgggaggctgaggcaggagaatcacttgaacctgggaggaggttgcagtgagccaagatggtgccacagtcctccagcctgggtgacagagtgagactctgtctcagaaaaaaaaaaaaaaatcctcccccatgctcttttaaaaacttagagtttatttatgtgtttatttattgacacagagtcacgctctgtgtcactgaaacctctgcctcccgggttcaagcgattctcatgcctcagcctcctgagtagctgggatcataggagcccaccatcaagcccagctaatttttgtatttttagtagagacagcatttcaccatgttgaccaggcttgtcttgaacccctgtcctcaagtgatccgcccgccttggcctccccaagtgttgggattacagatgtgagccaccgtgcctggcccctttgaattttgaaacaacattattttatttttgttatttgtaattttattattattattattaaagacagggtcttgctctgtcacccaggctggaatgtagtgacgccatcacagctcactgtaatttcaaactcctgggcacaagggatcctcccgactcagcctcccacgtacataggactacagacgtgctaccacacaccagactaatgaaaaaaaaatgttttttcattgtagagacgaggtcttaacagttgccgaggctggtcaaattcttctcaagccatcttcctgtctcagcctcccaaaatgctgggattacaggtgtgagccactgtgcccagcctgaaattagacattttcagatctgcaaagaaggtacagagagttcttttattcccttcactcaatttcctctaatgttttttgggttttgggttttgggttttgttttgagacaggatctcactctgtcgcccaggctggagcgcagtggctcaatctccgctcactgtagcctccagggctcgggtgatcctcccacctcagcctcttacgtagctgggactgtaggttcacgccaccacactccgctaaattatttatttattttttttttgagagtcttgctctgtcacccaggctgcagtgcagtggcgtgatctcgactcactgaaacctccacctcccaggttcaagtgattctcctgcctcagcctcccgagaagctggactacaggcgtgtgccacctgagattacaggcccggctaattttctgtatttttagtagagacggggtttcactgtgttagccaggatggtctcagtctcatgaccttgtgatctgcccacctcagcctcccaaagtgctgggattacagtcgtgatccaccatgcctggccttgttttgttttttatttgagacaaggtctcgctctgtctcccaggctggagtgcagtggcaccatcatagctccctgcagccttgacctcctgggctcaagtaatctttctgcctcagcctcccgagtggctgaaactataggcgtgtgccagtagagtcagtgaatttctttgatgttttgtagagatgagggtttcgccatgttgcccaggctggtcttgatctcgtgggttcaagtgatcctccctcctctgcttcccaaagtgctgggcttacaggcatgagccaccgcacctggcctggtcatgtattttgagaaccttcttcaatctgggataaatgtctgatgttgtctaatggttagattgaggttctaggtttggggataatatcagacagttacaaatgtcctccctatcacatagctggggtccgtgatgtcagtatgacttatcactggtgatgttgattttgatcacttggttaaggcagtagctgccaggtgtccccactgtcttggagacagctttgctctccatggacgtagggtatgcaagaagcaggggaacctttggctaaagatacattgtgatggccgggcgcagtggctcacgcctgtaatctcagcactttgggagggtgaggtgggtggatcacttgaggtcaggagtttgagaccagcctagccaacatagtgaaaccctgtctctactaaaaatacaaagattagccgggcatggtggcacatgcctgtaatcccagctacttgggaggctgaggcaggagaatcgtttgcttgaacccgggaggtgaagggtgcagtgagttgagattgtgccattgcactccagcctgggcaacaagagcaaaactccatctcaaaaaaaaaaaaaaaaaaaaagatatgttgtgatattgtgttgtgatatatttttaaaaaaccatattttggtcttaggttttctagtacataactcctaaaacccttgaaatcagctgggcacagtggtttatgcctgtaatcccagcactttgggaggccaagacgggatgatcccttgaggtcaggagttttcgagcagcctgggcaacatagtgagaccccatctctacaaaaaaaatttttttaatgaagacaataaaaaaaaactatcttctagattgttcagaggattaaatgggctggccaggggtgggggctcacacctgtcctcccaacactttgggaagcagaggtgggaggatcacttgagcccaggtgttggagaccagcctggacaacttggtgaaactccgtccctacaaaaaatacaaaaaattaggccgggcgcggtggcttatgcccgtaattccagcactttgggaggcctaggcgggcggatcacctgaggtcaggagttcgcaaccagcctggccaacatagtgaaacctcgtctctactaaaaatacaaaaaattaggcaggcgtggtggcgcacgcctgtagtcctagctacatgagaggctgaggtgagaggatcatctgagcccggggtcgaggctgcagtgaaccgtgatcacgccactgcactccagcctgggtgacaaagtgagactctgtctaaaaaaataaaataaatgaggtaatgtatacgaatatgatgcacggagcggaccttcaacaattatttttattgctatgatctgcataattggcacaacagggccctgccacatcgaactgtttaagctcagaaccgtgtctgtcacatgtggagcgatccatgattgatgctatcattatcaccaccatcatcccaccaacccgcccatcggaaacaagctttcatcgaatcccatcgttttttccttttttgtaaatctctttcctcggcctggctctgccgcccaagtatgctcgtcaggcctttgcccacctggaccgggcgcgggcagcccggggctgaggattctcgagccttggtggaccacaggctcccgtcgccccgcccaagggcctggaccgcctgtggtctccatggaaacccgccagccacagggggcgtgacgccgttgagacagacagagatattcacctatcagatcaaagttatctgggcagggcgaacaaacgggacctccgagtggtacgtccttaaggcggggcgggaatacggcaacgggccgcgggggctgttactgtcgctaccaatcaagagtcgagatggctttgatggacaggcatagcgcgagtgcgggctttcgcccaaccggcgggccgctgtcccgaaaaaggaccaatgaggaggcggcaggggtggggcgaaggggccggttgctccggaagtggagggagggggtgaaaatggcgcccagctcgaaatcggagcggaacagcggggctgggagcggcggcggcggccccgggggagccggagggaagcgggcagcagggcggcggcgggagcacgtcctcaagcagctggagcgggtcaaggtgaggcctggagccggagtggggagcgcgccggagggtggggagtagggacgagggaggcggagggaggagggcgttcgcggggtgaggggttgggggcggggccccaggggagggggctcggatgcagggcctgggcggggcccgggggagatggcttggatggagggggctcagttgggggcctggatgcaggtggttgtgtcgggtgaccggcaaaggggctgggatggagggggttgggggcggggccccagggagggggctcggagggaggcgaccccagaggccgcagggagaatcaggaggaagggggcgatccaggcttttcaaagctctgctcccatggttgctccataatggaaccttcccgccccctttgcagagcccctgccgctggctttgggcttcctccgcctgatgttcctctccctgcccaagccccgaccacacatgagctgggagttccagtacctgggtgggcctccccattgaaagtgtgggagctccctggatagggctgagtcttcccccgcagagtgagagttaccgaagcaggctctgtctcctccatcagactggaaactcccagagctgggggatgatgtctctctcccccatcagtttgggagctctggagggcagaaatgtggatctcttgcaggtgggcagtaactggggcaaggctgtgtctctgtggacagggactgcgccttctccgtgaggctggtagctttgtaagggcagtgctgtgtctcccccttttgactgggagctccctgggctgggacagtctccgcccttagcctgggagctccctgggcttggctgtggttccgcccttagcttggaagctccttgggcagggactgtgtctcccctgtcggcctgggcctggctggccaggctgtttcctccgtcagactgagacctccatgtggacagggctgtctcccatcagacagggagcttcccagacaggactcttcccatcagattggaatgtcttgaaggcagagttgggtagcaagactgaggctgttcggatatccctgtgcctggcttctgcctgtcagtccccgcagatccttccgcggtgaagttttggggatgagggattcccttggattccgttggaaggcggtagttaattgggaagggggcgttgggtcattggttaggctcacccttctatctgcctcgactggcccccagcagaggccagagctgccccggggaggaggagcccccttgtttgaaggctggtgggttgggaacagatgggtgcaggtcaggactctgtcccagcctccttagtaggataaatacccacagcttagggacagccttcagggagggaagcaggtggcccagcgtgggacagggtgattggggaactttcttgggggcggtgacgctgggctcagtcaagagggacctgaggctgaagaggtatggaactgggaaggtggcctgggtccctggtggagatgaaggctcaagcgcggtccatctggctttactgtccccatctgcctcagttgttcccaccttccagagcttggccttcttttgaccattatggtgggctgggccggtctggacccggtgagagccgctctgcctctctgccgtgggtgagggggctgggggctgcagatggtgcctgaagtgccctggccaccccttccccagatcagcggacagctctcccctcgcctcttccggaagctgcctccccgggtgtgcgtgtccctcaagaacattgtggatgaggacttcctctatgcagggtgaggctgggcccaggcaaagggggcaggtgggcgggagtggtgggctcgccctgacctggccgctgtgccccctccacccccacagacatatcttcctgggcttttccaaatgcggccgctacgtcctctcctacaccagcagcagtggggatgacgacttctccttctacatctaccatctgtactggtgggagttcaacgttcacagcaagctcaagctggtagggaggcttcaacaccaggctggcccttcagatggtgtggttcagcaggtcacagcaacctctgagcctcaggttccttgggtgtaaaatgatcatcatgtactcctggggtcatcatcaagattccatgtgttagatccaaccatatgaaattaccagggcctggcatggtagctcacacctgtaatcccagcactttgggaggccaaggcgggaggatcacttggtccgagtagttcaagaccaggctgggcaacatggcaaaaccctgtctctactaaaaataaaaaaaaattagctgggcatattggcgtgtgcctgtagtcagctcctctggaggctgaggcaggaggatcacctgagcccaagagtttgaggctgcagtgagccatgatcacaccattgcactccagcctgggcaacagagtgagaccctgtctctaaaacaaaacaaaacaaaacaaaacaaatgaaggctggccacagtggctcacgcctgtaatcccagcactttgggagcccgaggtgggtggatcacctgaggtcaggagttcaagaccagcctggccaacatggtgaaaccccatctctactaaaaatacaaaattagccgggcatggtggcacatgtctgtaatcccagctattccggaggctgaggcaggagaatcgcttagaacctgcgaggtggaggttgcagtgagccgagatcgaaccactgcactccagtctacagagcaagactctgtctcaaaaaagaaaaagaaattaccatttttatggttcaaaatgggtaaatagcagcaattccatttggttcaacacaccctatgaagctgtagaacatgttggctcaggccagttagctttattaggaccaggccaccctggctttagccttgacccttgactcctggaacccccccaggaggtgtgctgttacctcagcatacatgtgaactcagagagctgaacgggcttcagggtaggctgggcttggaaccagtgcctggcgcagtctcccccgggacattgttcccatcggctgcatcccaccctggcctggtctccccgactggtgaaaggagcctccacggctgtcctcaggcaaggtggaggggtgtggcgggtgctgttggggtgctcctacccgctcagccccagccctgatgagggactgcatcgtacagcttcgggggacctccgcagtttccctgacccggtgctgcccctgaacgtgcctcacaggtccggcaggttcggctattccaggacgaggagatctacagcgacctgtacctgaccgtatgcgagtggcccagcgacgcctccaaggtcatcgtcttcggcttcaagtgagaccaggcgcctgggggagccttggctggttggggcagggggtgtgcagtgggggccccccaggcgccgaccaggcagctgagggtatgctggcccccagcacccgctcggccaacgggatgctcatgaacatgatgatgatgagtgacgagaaccaccgtgacatctacgtcagcaccgtggccgtgccaccgccaggccgctgtgctgcttgccaggatgccagccgagcccacccaggtgagggggccgagggggcgagggcctcttcccccctcccccccttgctccgggccgagagtgagctgctgtggcgtgtgttgctacaggagacccgaatgcacagtgcctacggcatggcttcatgctgcacaccaagtaccaggtggtctaccccttccccaccttccagcccgccttccagctcaagaaggaccaggtggtgctgctcaacaccagctactccctggtggcctgcgccgtctccgtccactcggcaggtaggccctgcggtctcgtggccacccggcaacgcgtgaagcgggtcctctccctaccccaccacacagacaaggggccccaggcgtagagaggtgggagctacttccccaagtcacacagcctggttgtgggaatgctgcggtccaaatgtggccacgcccaccacagccctgcccacgggatctttccagtggctgagatgtcccaccatggctgcctccagcagccacttggaatgtggctcatgtgactgaggaactgagcttgtgatacttttttttccactggagtccagtggtgcgatcttggctcactgcaacctcccaggctcaagcaattctcctgcctcagcctcccgagaagctgggactacaggcctgtgccatcatacccagctaatttttgtgtttttagtagagatgggatttcaccatgttgatcaggttggtctcaaactcctgacctcaagtgatccactcaccttggcctcccaaagtgttgggatgacaggcgtgagccaccgcgtctggcctgtgatggatttaattgtagttgttttaagctgaaatagctacagttggctagctggacggggtagcgcccctttctcttaagaagagaaacgctaatgtgacatttcagggtgtggttagtgggcaggcacttggcattatatgtttgatatcggaaagatgccagtgagaatcacaagatgtcccttgacagtgacaaatgtcaggaggctggatcatgccaccggctggcagcaacaggagggagggggccccgggggccatttggcaacagaattgtgactatgactgacccagctgccctgtgcccgggtctctccctctggcagagtctcactgggtccgtatgtccaagactgctgagggggagttgggggccacctgaagaaccctccctggggattggggagcgacttaggaggtggcgaggggttgggggcatctgtggaacaccaatgaaggcccctgtgtgtgcatccatggagcatgtgtcagatgcgtgcacatgtgggtgaaacacaaggaatctataactggaaccacttaatataaattaaaaagacgatttaggccaggcacagtggctcatgcctgtaatcccagcactttgggaggctgaggcaggcggatcacatgagatcagggagttcaagaccagtgtggccaacacggtgaaaccccatctctagtaaaaatataagaattagctgggcatggtggcacatgcttataattccagctactcaggagactgagggaggcggaggttgcagtgagccgagattgtgccaatgtactccagcctgggagacagcaagactccatctccaaaaaaaaaagacgttttaattttgcaagaactcagatgcaaagacgtccattaaatcctcatggaaatggttgtccctggggcggtcggggaatgggcaggattaaatgtatataacgcagcccacaaataagccaggggccagggcactctgtccccagacatatctggggctttctgtcctcacccccaatctataccaggaagggtgaggcgctgtctcttgctgaggcttgaccacttggtttttggccatgaaccccccagcttgcgagggttgacgccgctctgcccttttggctgtgggtcctgttaggaacgaccacagcggactatcagctctgtaccagcccagggaaagggcgtggtcatcagtgggagctgccgacacagaggggtgctttcttccttggccattgtcaccttctgttccccgccctgttgtgggagggctgtcacggtggtggaggggagcccgtactcgatttttctcagatgtgaccttgggcatgtttatccctgagctgcattctgggggatgtggcccctctctaggggttgcttgtagggggcttggaggaaacctgggttggggcccagccacagggttgcttagtgaatatgttggggttctccatgtgttccccacattccttgggggagtcgtctctaggcaggcagagacagaggccctgattcgatgaagtgtgcccgcagtggtctggcttgtgtcaggaaggaccgagggctttgccttaggtcttccatatcagagaaacgccagtgaaaatcacaagatgtccctcgacagagtggcagatgttaggaggctggatgctactgtagtgaacactctacgctgtagagtgttgtctccctcagggcagggttctgtctgtctggttcactcctgtgtcctcagtgtggggcgctcagtagacagcttaagaaaggggtttgaatgaacgtctgcacgcatgaatgcgtggtgtgcatgcgcagaaaggtctttccccttttgggtgtttcaaactgatctcagcatagccaagtctcctagaagtgtctccttaaggtgggtttctgaaaacccctggggacactgagcgaggctgggagcaccccagactgacacttctccacccccatctcttcttaggtgacaggagtttctgccaaatcctgtatgaccacagcacctgccccctggcgcctgccagcccccctgagccccagagcccagagctgccccctgccctccccagcttctgccctgaggcggccccagcccgttcttctgggtctcctgagccctcgcccgccattgccaaagccaaggagtttgtggctgacatcttccgccgggccaaagaggccaagggcggggtccctgaggaagcccggcctgccctgtgcccaggaccctctggcagccgctgccgtgcgcactctgagcccctagccctgtgtggagagacggcaccccgggacagcccccctgcctcggaggcacctgcctccgagcctggctatgtcaactacaccaagctgtactatgtgctggagtccggagaggggacggagccggaggatggtgagcggggggcaggcatgtgacagggcctgggatggagaggccagcccagacggggcccctggcctccctccaccccacccccacttcctgcctccccagagttggaggacgacaagatctccctgcccttcgtggtgactgatcttcgtggccgcaacctgcggcccatgcgggagcggactgctgtccaggtgggtgtgggcagtgggcgggccaaggacagtcccggggagctgccggggggcagttggcaccgtcccctgcgcctacccactcacccgcagggccagtacctgacagtggagcagctcacactagacttcgaatatgttatcaatgaggtcatccgccacgacgctacctggggccatcagttctgttctttcagcgactatgacatcgtcattctggaggtgggcccagggcgggcagggtgggcccagggcctcctgtactctggggtcgccctcaacagttggcatcatccacccccacccccaggtctgcccagaaaccaaccaggtcctcatcaacattggcctgctgctcctggccttcccgtcccccactgaggagggccagctccggtgagcgcggggatcctgccctctctgtccactaggggggccactggcagacacttcacggtgggggtgtggggacgtgagaaggctctccctgtgccacaacctggctgggcccctccatagctgttccaaagacaaaaggccctcagggtagcctggggcctggttcaggagcccggctgtcccagcgtttgtcctatgtccctctccactgtagaccaaagacctatcacaccagcctcaaggtggcatgggacctcaacacagggatcttcgagacagtcagtgtaggcgacctgactgaggtcaaagggcagaccaggtgaggcagggctggggggcagggtcagggcgcggccaaggcgacgagagccactcaccccctggccccgcagcggcagtgtctggagctcctaccgcaagagctgcgtggacatggtcatgaagtggctggtgccggagagcagcggccgctacgtcaacaggatgaccaatgaggcgctgcacaaaggtggggctcggtgaccccgtgatggtcagggtcaccaggaacacttgtcctcacccaggagctgattcctgagcgctgatgaaatgggtgggaaggctggtgaggagagggcagcccaggccaggcccagctcagcagccctgaaagtgtggggcctgggagcctcccaccagtcatggcctggctggtcactcattcacgctacatttattgggtagctgcaggctagaggtggagggcaactcagcagggtccctgccttctggaaccttctgggccagaagcaagtcaggtggagggtgtggccgcagggccaggcaggcaggggctctatgctttgtctccacctgtccctgtagggtgctccctgaaggttctggcggacagcgagcgatatacgtggatcgtgctgtgagggccaggccgccccggacactgactccaactacctccgtggcctgggaccggcccccttcctggggtggcctcttcctggccggctggcccaccgactgatgaccggcactagtgttagcctgcggaacggggctgggcagggcagcctctgttggcctgagggtctggacgctttttatttatgcctatttaagttgggaaggggcagagagagggcgccccctgccccaccagcctgagtgccccgccttcaccccgagctgggcatgggcctggcccctcgtgcatttgcccttttctcggctacagctgtggacgttgccctcggggaggtcgaatggaccccattccccctgccctgcccgcccccagcctccccacccaggccggcaacctggccatccccattccgttcttcttcatgtaataaatgttttaatttctgaacctcattgaggtcctgtcactgcagcttggggcccagctggagcccccgccccaaggcccccaccaaggcccggcgagtcagcagtaggcaaatatcacagcggaatttattgttttaagaaagactacaaaaaggtagaaaacagctcggcacactagactaccacacgtgtggacactttcaccaccgggagagggagccccgtgggcacggggactgggcagggccgccccaaaagctatagcacgcggagcacacaaaatagtgatttttatacaataggtcagatttccatttttttttcctttttcttgccataaacatctatctcacaggctgaaaacactgagaaaactggaacagataaggccatgatggttggaaaaaaacccaacaagttaccaactccgctcgggcggcgctcacgaatcgcacaatagtcatggggtgggggtcgcacggcacggaggagaagcgtggtctccgggaagataggggcacagaaaaggttccattacaaaccagcggcggagggcgggggcgcgggggctggggtctgtgggcactccccggctccgcggctcgctgctctttggaagctggaggccgtgccccctgccgccctcctcacagccgggccgggcagtgcccccttcttgagcttgggggcaagggagggcccagcgctggagaagatgcgacacccacggctttaattgcacttaataccaagaaggggaagcagtggggttgctgggggtagggtgtcccggggctgctgctgacagtggggagtccccaggtgacgcccacctgcgccggcccggggctcagggctgggcccaggacaggctgtgcaaagccagcgagctgaataagttaacagtttcgcacgggagggggcctgcctgcctgccccctggggtggtgggaggacggggctggggagaagacgctggggcctgggaggggggcggccaaggggccgagctggatgccccgcggggcacctgggcacgcggcgggttccttaaggcacgtcttttgtgtcagagtttgcagctgcggctccgcccagcccactgattgtgccggccccataagggaggagggccccggtcttccctgtctcggagtccccctccctgccctggctgaggctggagcagtgaccacgaagccacagaagctttgagggaccctggcgtggaggggtggcgggggcgggtggggcggggaggccaagggcttagctggagggcagcgcctgcacgaagaggccgcgcgcgtcagtccgcgccagcttggccggcggctccagggtctccgggcccagcgcgggtgactcgccgccagccgccagtgagatgtcctgcggcagctcgtcctcgctctcctcctcctcttcttcctcctcgtctggaacacagggaccaagtccggctcggggcggggtggcaacgcccccgggctcctcctcctcccgagcccctccgttgtccgccacccccgggacccgcgccctgggtgggaacacgcctcgcctacctttgtcggggtccagggggttcagggaggtggccagattggcgaactggaggaagaagagaagaaaatgggtgagggtcccgccgcctggcgccccgcccgcgcccccagtggcccgcctcgcgcacctcgcccatgacggcgatgggggtctcgcccttggcctgggctacgcggtgctcgatcaggtagtacatgtactcgtcgtagagcagccggatgaggtggaaggaaccgaagctggcggcgctgcgcagggtcaggtcccggatcaccatggagctggggatggagacggagaggagaccgtcaggccccgtccggcccgaccccctctccccctccccgctgcgatgcgcccgggcctcgcgccagcccagtgactcaggctggatcccgcacagccttcccggcacatgagcccagggccccagcctgcccgcccagcctgcaggctcgggtcgtcgtagaagagcacctgagacccccagggacgcggggccttccctggtgccgcccggacccgatcccgccgcgcgcgcacctgtagaaggaccacttgaggaggaagagcttggcggccttggggaagccggcgctgccctggtagggcttgagcacctggctcaccacgccgtccagccaggccgcccactgctccagcgagttctgctgctgcagcgtcaccttgaagtcctgctccagccgctgcaccacgcggtcctcgcagcggcacacccacgaggcctgctcctggggcacagagggtgggcgggcgcccggggctcagccgccgtcacccccgcctggcccgccccgttaggctgcccctcattcgcccgccccgccccgccccgcgctcacctgcacgttggcgaagtccacgcggttgaggtcgctcagcatctggttgatctgtgcggtgttctgcagcacagcgcgcgccgcctgcgccaggtggttgagcgacgtgtagcgccgcagtgtctgcgcgaaggcgccagccgcggccacctgcgtgcagggattgaggggcttgctgcttccaaggaaccccagcccgccagccctggccccaccccgctgcaacctccctaagcctgtttcctttttcctaaaaaaggagggatgtgcctcgctacttttgttgggacacagaaggatcgggaccttcaaactttgggtgtccactcacaagcgccccccaaaattcaatttattgtgttctgaccagggcacaatattctttgaaatttatttatattttttaaaataactattgagacagggtctcgccatgttgcccagactggtctcgaacttctggcttcaagtgatcctcctgcctttgcctcccaaaatgttgggagtgagccaccgtgccaggaaaggccttttttttttttttaaaaacgaaagaacacaatagataatatggagggcactgcacagaaagggcaaacactgctttgataaacacgtttcattttctttttctgttttttgtttgacactgaatctctctctatccaggctagagtgcagtggcgcgatctcagctcactgcatcctccgcctcgtgggttcaagcgattctcgtgcctcagcctcctgggtagctgggatcataggtgcacaccaccacgccgggctaatttttgtatttttagtagagacaaggtttcaccatgttggccaggctggtcttgaactcctgacctcaagtgatccgcccgcctcgcctcccaaagtgctgggattacaggcatgagccactacgcccggcctcattttctttcgtaccctggaatctcagctctgggagaggacaggggttttgtccatcttgttcattgctgtgtactgagaaggaggttgtgtgaatacatgaatacatgagtctcgctgtttcttctgaagggtttgctcctggatctggcatctactgtctccaaaggccccagtccctgccctgtgcccagcggtggtttttttgtttgtttgtttttcccaaccacatcccatcaaattcctcacatctaagtagtcagcgaatgtgcatcttttgatgaaaaaggcaagtattatgtttccttatagatgttgttgcctttcttaaaaagttttatctgtttctgcacacctgaagcactttctagcaaggctgtctaaagggaactactgtacatttgcagttggtttttatttttgaaagatgctgtgttgagtacagtaacaccacaaagggggttgcatttcagaagtgggtgcctgaggacactggtttataaagacaatgcccagggtgctccccgaggcggagaaggtctccccttcctccacaggcatcatccctggaacaggcgtggggacaaattttaccgcccctggggagcagaggagacggaggcctaagccccagagataggagaaagggaccccctcacactctcaccttcacccgcagcatctcctcggggatgttgaccatggcgtgggtgagccagctctccaggctcttggcaaagttccggatcgcttgggtcaaggcacctgtgggcggtggcgggggtcggtcagggcagggcgggtgtatgtggggcaggggatgccgagcaggccgagcactcactggggatgggccgcagcacgtcgggaatgaggatttccaccaggccctggtacagcacgttgtcacagtgcttggtccattggagcacgggctcgaacttggagaggagcaccaggatggctttgggcagtcgcttctcggcctcgtcatgtctgcgggcacccaccccaccccgggtcactggggtactctatggtcctgcccccatcgtcagaagggaacaggtagcccctgtccctgacccagggtcactggggtactctgtggttctacccccagcatcagaaggcacaggtacccccttacccccactccagggtcagtggggcactctgtgtcttgcctccagtgccagaaggcacaggtataccttgtccccaacccagggtcactgggggcactctgtggccctgcccccagcgtcagaagggcacaggtacccccgtccccaggtaagtaccccctgcctcccaaagatccccagggtctggttggcacaggcccgaggggtgggacgggatcctatgccctaccctccatacaggggtcaaacagattccagaacctgccactccagggagaagatggtgccctgccccatgcctgggcttagtcaggcactccacccccgactgttgagtgtcgggtggctatacacactccacacagccaaggatatgtgtaccccacaaactgcaggggacaagcaggtgccccaaccctggccatcaaaatcacctgcgggtcatgccctcctcccccctctccctcccacagtcgccgggcagtactcacacagccagcggtggcgcctcactgggctggctgaggttgtacctccagaaggtcttccacagcgtctccaccagggtgaactgcaggttcaccatgacgtcgacaatggcctgtggcagaggcggatgctcagggaggctggggggcagcatggccctcccatgcccgtggctgcgtccccgtccacttgcctgcccacctggccaccctacctcacagtgttcccggtacaggacctggaaggctttgatgtccccgggcccgacgccctcaggcagcaccttgccctggaggtcgagctctgtgaagtcagggaggctccgagaggcatctagggggccggggggaaccgtgaggcccttcatcccccttgcctgcccaccctggggtcctactgacctgtccgtttcccatcagactggggtcccccatgtgccggtgagacaacgctaggtggggtgagcgcctggcccgggcccaggacgggcccaggagtgagggcccacactcctctggcagagaggacaggagggtcttgtgccagccctgcctgtctgctgagtaacagcactgcaccaaccctcaggacgtgggcctctgagtcccggctgcaacacagcacccacctggccggggaatgggtaggcacccagggcacagtcaggaccacaggacactgccctgagcctaagcaccccaggttggggctagccatggacagtcgccctagggatgcccctcgactctgctagaagtattgttccccaccctccaaatgggatgtcccggcctccagggcaggtggggaaatgagctcccacgtgctcaggatcaaggatgtgtggctggactgtgggttccaagggttgcttgtttacttagcatcctttggccctgttttcatggattgttgtttactttgtctttttttttttttaagagatggggtcttgctatgttgcccaggctggtctccaactcctggactcaagcaattcctcccacctcggcctcccaacgtgctgggattacacacgtgagccactgcacccggccttttttattttcctgagacagagtctcactcactgtgtcgcccaggctgcagtgcaatggcatgatcttgactcactgcaacctccgcctcctgagttcaagcaattctcctgcctcagcctcctgagtagctgggattacaggcacccgccaccacacccggctaattttggtatttttagtagagatggggattcaccatgttgactaggctggtctcgaactcttgacctcaagcgattcctccagcctcggcctcccaaagtgctgggattacagacatgaaccactgcaccaggccttacttttagaaacactgggtacacacctgccttcttggcgagtgagtggtcctagccctgtggacaccatggctgtgggatggctggatgggaaagcgagtgggcctcacaggactcatgagagaagaggacctgccgtcatatctccaaaaagtaaccatgtccaactgggtgggatttgaaatctcatgtatgccgggcatggtggctcatgcctgtaatcccagaactttgggaggccaaggtgggaggatcacttcaggtcaggagttcgagaccagcctagccaagatggtgaaaccccatctctcctaaagttactaaaattagccaggcatagtggcacgtgcctgtagttccagctactcaggaggctgaggcaggagaatcacttgaacccaggaggcggaggttgcagtgagctaggatggtgccactgcactccagcctggacgacagagaatctatctcaaaaaaataaacaaataaatacaaaaataaagaaaatctcaagtagcataaaggggattcactgggaagctcagaacccccgagaaatgctttgcattgaaagaaatgagaatctaccttgaagaaggattctagggacagaactgtcactgtggacggagactgtgatgtctcccccaccccctgctggttctcgggcatctctcaccaagccctccccagctcagaggctgcctgccgccatccagctttgggaaccgtctgcacggggcagggaggcggtggttggggaagcacgggccagggagctctcacccaaaaattgctggtactgctgcacctgggcgctgatgtccgacagccccgtgctcggctgctgccccaccgccacgccgttggtcatgccttccatcttctggatgggcttgagcctggagtagaatgggcaggtgggccggctgctgggggccggcctgtgtgcccttccccgcctgccctgccctgggtccggccctgccttcctacctctgcttctgcgagaagggctggccccgcatggccatgtgctgctggtcctccatcagccgcagcaggggtgagctggccttgatgcgcaggccatagtagtggtacttggagttgcccctgggagggaggtggaggggaagggctgggctgggggtctgccggctggccggccatggagcacctcacagcacacccgtctcctctctgttaggagaatggatagagagacgcctgccctgcagagacgggggtgctgcactgaggaggcacaggggctgtgggtgtcaggagagatccagcggtttgcccaagattatgcataaatgaatggctgaatggatgaatggctgaacgaggtgacgctgaagctgggaatgggaaccgagacgtgagcggaggtgagccatgggggttgcaaaggagaggaagagaggggcgggttcttgggatgccttcttgttccttcccgcatgaatttactgactcacagaccctgatgaagcactgactaggtacaaccccgcgtcatcgaggtacgagcactgcagacggaccagaacaactgaaataagtcatgtaaaaggcacgtgtgggccgggcacggtggggtcatgcctataatcctagcactttgggaggccaaggcaggtggatcacttgaggacaggagttcaagaccagcctggccaacatagcaaagccctgtctctactaaaattattttttaaaaattagctgggcgtggtggcacatgcttgtagtcccaagctactcaagaggctgaggcatgagaatggcttgaacccgtgaggcagaggttgcagtgagccgagattgagtcactgcactccagcctgggccacagagtgagactcttgtctccaaaaaaaaaaaaaagtcacgtgtgagcgtgctgaatgctaaagagaaaaataaagcagggttggggggtgtcgggcaggggagagggggaggctgcagttttagttgaggcagtcaggggacgtgcaagtaaggaggggtgagaagcacatgaggtggaaggcaccgccagtgcaaaggcctagagtgggagtgagcggggctgtcgaggagcctcgcagaggccggcgggactgggctggactggactgcctgagatgactcggagtgggggtgggccttggcatgcccaccaattccccagggactgctgggagtagacggatggccctacctggtgcccagacggcgggttcgcaggcccatgaagacggagcggatgagcttgccgaaggaggcggcgttgacgggctccagcttctgctcctggcagtgcagtaagtagtggcagtagagggtgctccgtggcagactcacgccctcagccgtctcatagttgtccaggagccactggacctggggtgggagggagatgggagagcaccagtcagaggcgcttccgtcatctctgagtgctggggctgagtgccccacatcgacttccagctgggatcctgacagccacgcccacataagttagcacatcctactgccatcctctccaagaactatgtcccacagaactctagaactgcactgtccaatacagttgccatgtatagctaaatacattaaaggccgggcacggctcacccctttagttccagcactttgggaggctaaggtaggaggatcacttgagcccaggctgggcaacatagggagaccctgtctctaccaacgaatttttaaaaaaattagctagtgtcgtggtgcacacctgcagtcccagctatttgggaggctgaggcaagaggatcccttcagctcagaagttcaaggctgcagtaggctatggtcaagccactatactccagcctggatacagtgagaccttgtctcaaaaaaaaaaaaaaaaaaaaaaaaaaaaaaaaaaaattagcaggacgtggtggctcatgcctgtaatcccagcactttgggaggccaaggcaggtgggtggatcatgagatcaggagactgagaccagcctggtcaatattgtgaaaccccgtctctactaaaaatacaaaaattagctgggagtggcggtgtgcgcctgtagtcccagctgcttgggaggctgagacaggagaatcatttgaacttgggaggcagaggttgcagggaggcagaggctgcagtgagccaagatcgcaccactgcactccaacctgtgcgacagagcaagattccttctaaaaaaaaaaaattatatgaatttatgcagaatgaaaaaaatcaaattttcaagccaggagtggtggctcacacctgtaatcccaacactttgggaggccgaggcgggcggatcacctgaagtcagaagttagagaccagcctggccaacatggtgaaaccctgtctctactaaaaatacaaaaattagccaggtgtggtggtgggcacctgtcatcccagctactcgagaggctgaggcacaaaaattgcttgaacctgggaggtgggaaggttacagtgaactgagattgcgccactgcactccagtctgggtgacaagagcaaaactccatctccaaaaaagaaaaaaaaagactagaatagactagaagccaggctacatcaggaccatgagggaccaccaggaccaccagcgctgacccaccccacaatcacacaaatgtcgaagggcccggttggggttggaatccagggctgccccagggacttcacacaaccacttctaggcacagggaggttccagcacccgccttcctgatggtggaagaaccctgttcaggaagctccccatggcagtgctggcttctctctgccctcattatctattctctataatcaattttaatcagaatagatggctgggaggatcgcctgaggccaggattttgagaccagcctaggcaacagagtgagatcctgtctctacaaaaaaaattttttaaaatccgccaggcgtggtggctcacgtctgtaatcccagcactttgggaggccgaggagggtggatcacgaggtcaggaaatcgagaccatcctggccaacatggtgaaaccccgtctctactaaaaatacaaaaattagctgagcgtggtggcacgcctatagtcccagctactcgggagactggggcaggagaatcacttgaacccgggaggcggaggtcgcagtgagccgagatcatgccactgcacttcagcctggcgacagagcaagactccgtcttaaacaaacaaaaaaattagccggacatggtgcggcatgcctgtagtcccagctacttgcaagggtaaactgggaggatcacttgagcctgggagtttgaggctgcagtgagctatgattacagcactgtgcttcagcctggacgacagaacaaaaccctgtctcaaaaaaaaaaaaaaaaaaaagtagacaacattttttttttttttttgagacagaatcttgctgtgtctcccaggcttgagtgcggtggcgcagtctccgctcactgcaaccacctcccaggttcaagcaagtctcatgcctcaccctcctgagtagctgggattacaggtgcataccaccatgcccggctaatttttgtatttttagtagagatggagtttcaccatgttggtcgggctggtcttgaactcctgacttcaggtgatccacccacttcagtctcccaaagtcctgggattacaggtgtgagccacagcgcccagccaacaatagacaacacttctgtagtattgtgttaagaatttcatgcatatcagctgaggcccagagaggctgagtaatttatctgaggccacacagcattcaatcccaggacatctgcatatgttctcttcattgggggccacacaggctcctgctagcggtggttggtaaccaccgtcatggactgggcttctagtgcccaccacccaccactgcctgcctcctctggggcccgcgttggggcacttaccgtggctggcgaggcacgggtggtgtgagagtaagactggctggcactgcccagcatgtagccgccttggatcacgtaggtgcctgctccgctgccgccgcctccggtgctgccactgccacccccgccaccgcctcccccgccgccgccgccaccaccactgccaccacctccgctgctgttgctggccccagccccagtgctggtggagctggcgacgacctggctgccggacacgtacatgggcatggagccactgctggccaccgcctgggaggtggcgggggtgctgacctgggtggccgtgcctgcggcctcgtagtagctggtgcttgccgtctgcgtgtacagcggcgtctcgggataggagtaggtgctggaacggctgggaaagaggcaaagccaagggagagtcagggggatgagaactggggggccgaggggcatgactgtgcaggaaggggggtcctaggaggggactggggaagcagcagctcccctgcagcaaggagcagatcctagcattcatctacaacggactgggtaccatcctgagtgcttgatgggcagtatttcatataatcatcagctgggcatggtggctcctgcctgtaattccagcactttgggaagcagaggcaggaggatcgttgaaggccaggagttcaagactagcctgggccacatagtgaaaacccatctctacaaaaaatatgaagattagccaggcatgctggtgcacacctgcaatcccagctacttgggaggctgaggcaggaagatcccttgagtccaggagttcaaggttgtagtgagctataaccatactaccactgcagcaaagcctaggtgacagtgagactctggctttttatttttgttattttatttatttatttacttattgagacagagtcttgctctgtcacccaggctagagtgcagtgtcgcaatcttggctcactgcaacctccgcctcctgggttcaagctatcctcctgcctcagcctcccaaggagctgggaatacagggctcaccaccacaccaggttaatttttgtatttttttagtacagttggtgttccaccatgttggccaggctggtctcgaacttctgacctcaagtgatccacccgcctcagtctcccacagtcctgggattacaggcatgagccaccacacctggccgaccctgtctttttaattaaaaaaaaaaaaaaataccgaagggttagggaacttggaatgctacacacttcattaaaaaaataaaattggcaagtacttcgagtgcctactgtgtgctaggcactgtttcacacactttggacacagcaatggacaagaatgaaaagccccggcccccggaaccgtctagttggggagacaggcaagaagccacgtgcaaaggtaaatgagagatcataacagaaggtgatcaggcagtgagtgaagcaggaagggggtggggctagagaaggcgatgctgtgattggaagggactagagaaggcgacgctgtgattggagaagaccatcaggaatgcagatatgtttcccctgagccaagctacctatcccaggctggggaagcctctctccttcagatatcgcgtgacgggatgggcaccggtgacacaggcttgaggctgcaaatcgtcacaagtatacaagtataaaaaccaccaggggttcaacctcaaggggctgttaaacaaaagatgatggaatcctatgcaggggtgaaagagaaggaggcaaggcttgtcgtcccccgaaagaacaagctccagaacctaacaccgggcagataagaggcagagaagagtggggaccgtgtgaccgaacaatagggaagaatgcgttgcatgtggcatgcgtgtctgtcatctgtgggcatggagggctccgtcgagggggacaggcagggggcacctctcaccatctcgctaaacatcgttggacatagttttgatctttgaactctttcaatgtactagtgattaaaaacatagcattaggccaggtgcagtgtaatcacacctgtaatcccagcactttgggaggacgaggcgggtggatcacttgaggtcaggagttcgagaccagcctggccaacatagtgaaaccgtctctactaaaaatacaaaaattagccaggcatggtggcaggcgcctgtagtcccagctactcaggaggctggggcaggaggatcacttgaacctgggaggtggaggctgtagtgagctgagatcatgccactgcactccagcctgggtgacagagtgaaactccacctcaaaaaaaaaaaaaaaaagggaggggggcaggggcaggcacggtggctcacacctgtaaccccagcactctgggaggccaaggcgggtggatcacctgaggtcaggagttcaagaccagcctggccaacatgatgaaaccctctctctactgaaaatacaaaaagttagccgggtgtggtggtgggcgcctgtaatcccaactactcgggagactgaggcaggagaatcgcaggagaaccaccctgaaggtggaggttgcagtgagccaagattgcaccattgcactccagctgtgcaacaagagggaaactctatctcaaaaaaaaaaaaaaaaattaaacatccagaaagacagtgtggtcagtcaagaggtggcctggctcagactctgaaggtggcaggggagggagccgcacaggcccgagtggttgtgggtgaacaaagagagggagttgagggggacagtggaaggagatatggaagcatggtctttgtcacacatcaggtccagctctcgatctctctgtcctgccctatgtctaccacacaaagtgacaccaagagcacatgacctgagcaagagcccctacttctccaaggcgggggccacagcctgctcactcctgcacacccagcatgcaatgtgtgctgcaaaaaggttgctttggtagatggttgctgaatgactgaataaatgaatgtgtgcagctctggatgccccccagaacaggaccagggatggaggcccaggggctgtggctttggccagggtggggatagggctggcaaagggtcgggaactcgcagtaattcactcagagggagagacagaaggggtgggcagctgacagcaggagtggcccccaacaacttctcgtagcagaaaaacccgatagcaacgatgaactaggtgcaatcacacacactatgatcactgagagaggaattcagacagaagcaaaggagagacaggagagacgctaccagggatggcagcaggaacccttggacaccgtgttcctctttgcaatgccctgtctggcccctgccagcttggctcaaccacacagtgaaaagattagcagcactggaaagaaacaaatggaactgtgaggtagccggacgccggggaccaagcctcacgatttagatgcctggaccaggcccactggggtcggtcagagcatcatgaccctaggactaagtcgatccatgagctaaccaatcccagcattgtccccagaagaacaagtggcagggatgaaaaaagaaatcatgcaaatgcaaagaaaaccaagtgaaacctctggaaactaaaccaacagtaactctagtactgcagcaatttctgtggagatgggagagggaaggtggcatggaggacccccggcgaggagcccgagccgggactgaagcggggccaggacgtggcccctgcctgacacggcccatacacaggaatggtagtgctgtacccagggaggggaagaagccccctatgcatcactgggtggggactgatgacatcgtggctgctgcatctgcacaggggttattacacagcagctaagagggtgaccaggacccacgaggacacatggtagaagagccaggaaagaaataaggtatggatggaatgtcctgcgtctatttctgaccacagaaagcgggtagaggctgggcactgtggctcatgcctgtaatcccagcactttcggaggccaagacgggaggatcatttaagtccaagagttcgaggagatgagcctgggcaacgtggcaaaaccccatctctacaaaaatacaaaaattagctgagcatggtggtgcacacctgtagtcccagctactagggaggctgaggtaagaggattgcttgagcccgtgagctgcagtgagccctgatcgcgccactgctctctggcctgggcgacagagtgagaccctgtctcaaaaaaaacagaaaaaaaaagtccagtgcggtggctcatgcctgtaatcccagcactttgggaggctgagacgggtggatcacgaggtcaggaattgaagaccagcctgaccaacatggtgataccccatctctactaacaacacaaaaattagctgggtgtggtggtgtgtgcctgtaatcccagctacccgggaggctgagacacgagaatcacttgaacacaggaggcagaggttgcagtgagccgagatcacaccactgcactccagcctggcgatagagcaagactccatctcaaaaaaaaaaacaaaaaaaaagaaaaaaatggatagagggctagagtttctgttcttagagtatctctggaaagaaacaaagaaacaggtcacagcatcctctctgggacagggttgagagtcaaatgattttttttttttgagatggagtgtcactctattgcccaggctagagtacagtggcacgatctcagctcactgcaacctccgcctcctgggttcaatcaattcttctgcctcagcctcccgagtagctggaattacaggtgcctgccaccactcctggctaacttttgtatttttagtagagacagggtttcaccatgttggccaggctagtcttgaactcctgacctcaagtgatctgcccgcttaggcctcccaaagtgctgggattacaggcgtgagccaccgtgcctggccttttttttttttttttggttaaaaaccaggctcatttgactcccaagccctaagctatgccggggtgcctttcccaaccttcaagggtccctctgcttcgccacttttcgtggctgtggctgcccctggggagtgcccacctgtgtgtctgtcacctgaggccttgaaggccggatggcctgctgggggctgggactggggactggtgtcctgggagactggggaggctccagtgcagacctgactccctcacccacccctctcccttcacttacatggcactggccgtgtagctggcatcgccgccctccacatactgcacctggctggagtacacgtgtgggacgggcacctgctggagctgctgcacctggggcagaggaagggcacgtggagggtcaggggtgggccagctcctacggttctccctctaaagggctggtgcccacccaggctatccctgacgcccagctcccggacccaagggtggcttctggactctcaacaaaacaccctggaggaggccagggctgggaatcaggaagagctgtgtcaggagaagccaggactctcggcttcggctggggccagcaagggtggggcctgacggacagtggaggggacccgagacagggtcctgtagtgggcgtgaaggttggaccccaggcacaggggcaaggctatcgctggagccatggagctacagaaagggcctcaggggtggggcctggaaaccgggcacaggatgtgaggggcggagcctggggccccggttggtgggacagaacctggaatcactgacagggccttaggggcggggcctgagtcccccacctccatcccccacccttgtctgcaggggcggagctgggacctggacggggcttgggtggggagtcagaggcgggtccctagaccgacccgtcgggcggaggtggggtctacagggcttgcggggcctggtgggcggcccagactgggcgcccccgcccccgcccgcccgctgccccccgcccgtgcgtccgccacctactttgagggccgtggcggccgtgccgaacactagcacctgggggattctctggatcctgaccctctggtcggggctggctcgggccgggagccgggacagtggctcgaagaccactttctgctgcggcaggagcaggtgtgggggcagcacgcccaccagctccacccactgctcggcgcccggctcgtaatggggcggcggcggctcggggctgcctagctgcggggcctcgccgctgcacgcgggcggccggggcggcggctccggcggcggcgtgggccggggatctcgctgctctgccttcctagcgggaaactgactgcctgagctctggaggacaaacagagacactggggggtcaacgggggcggccgcgggcggggctccaggcctccacccaccgggttgctgagcgcgcacgcagccacccgagggaagatccccgccgcccggggtctcggagaggggttagaactgacccagggccacgcaagaaagaagaggggtttgaatccagatctctcttagcaaaacctggaccctgagctgccagggggccgggaaaggggaaggatgtagggcagtgtctgcagctcacagaggcatttccctccctgcggcctcaggggcctgcactccccagccccagcccgggaccagcccctttgcccgtggggtaggagggggagacacacacctcttgagccacgtggactggctggaggccctgcacggtcagcggctgcaccgggccgggtttgggcgcttgtggagtggcctggaccacagatctctgggaggggaaaggcaacaataagatgaccatggcaacgatggccgtcaacctacccagcccctgcacaggtgagcttctgtaaagctcacagcagacccataagcaagaggccaccattctccagccaagcaaggagggtgctggatccattactgataaagtgaggctcccaggaagcagcagggctgagttgaacctgggactaacttcggggtctctgctctccgccccctctccctacgggcccctgaagctgtgccaagaacccgcaggcaaggccttgggttatctttcgtccccacaccccccaatgtcaactgtgtgccctgttctgtgctgtggcgggcatgcggggattatcctaggggcgcagagccagggacggaggctggcggaggagggtgctgagtggaggagctggggcctggacctaggtctggaggttcgggggggctctagtgccaggcgggggagtatctgtgaaacctctgggacagggtttctgtttacacttggggaagggtctatggatttcatctgttttttcaaggggcttggaaccccctcaacttcagtggtaacaaccagatggtgcgcagccccagcatcttaacctgcgccggctcagggctctgcctcctgcagaggctgggtgtggatttgggggctgggtcccctccctgaaatcctccccagaaggagccaggatgtggcctcggggcttccttcaggcaaatgggcccaaagaggctcaggtggcttctccaagcggttcccatggcccactacgccccagtctccttccaggaggttcaaatttcgtcctccccgcggctcccccatcctctagccccaggatgctgagtctggagacaggcagagatgcttatcaaaggccagggtggcaggctggggctggacccacatgggctgggctctaataggccagaggcacagccgtggggggctgcagaggctgcctggccggtacccctggaccgagccactgcccgccttggcctggcacctcttgggtgacggggacactctgctggacgccgtggacctgcagctgctgtggcactgtgcccgtgggggccccggctgtcttgctggaagagctgttggcctgcaccggcgactgctgtaagggaaggagacacaggagtgccgctggggtgggcttgcatcctctctgaggtgggctcacacacacacccttctcaggagagctgtctggggagggcggcagtctgtggggacctatcccaaccaccgaggctggtaactgaccgcgtcccacgcatccaaatgcctactccctgcaacagtcccagtcaactcccagcaatgatgggggtttaaccctccccagcaaggttggctgatggtgggtggtgccgccagcacccctgaagctctcctggggctgaccctcaaaggttatagcaatgacgacagcagcctctggtgtgatattgggccgactcccaccagacactgcactgagcgctttaaatgtactcactggaatctcatggcacccccacttcccaatggaggggcagaggggaagggacaagccctgggtcacatggctgcaggcgatgaggcacagggctgagcccaggcaggctggccatagagccccatgtctgctctgagccctactgtgcctcaggctgtaattcccacagcaagctgaggggtggttgataccatcagttgtttgacacagagaaaactcagggctcagaaggctcaaaggggccgggcatggtggctcacgcctgtaatcccagcactttggaaggctgaggtgggcagatcacctgaggtcaggagttcaagaccagcctggccaacatggtgaaaccccatctctactaaaaatacaaaaattagcagggcgtggtggcgcatgtctctaatcccagctactcgggaggctgagacaggagaatcgcttgaacccaggagtcggaggttgcagtgagctgagatcgcaccacttcactccagcctgggggacagagcgagattctgtctcaaaaacaaaacaaaacaaggctcagaggcctgcctagagtcccacgagaggaagtggctgggccagccatctgaccccgagctcctgatgcagacagcatccacagcctgtcttcaacaccctcattggtgttgtgggtccccagaatctaccctgtggtccaaggcttcctggaagagactgtcccaccctccggggggaagaggaacccactttgtttctcggaatgcagttccctgagctggagctgccaggaccatctcaacccaggaaatcacctccttctcccagagcagagctccacggccgcttagctcagagctggcagggccaggaattgggcagctaagccaccctacctggggtcaacaagggcgttgcactgggagtgaagagggaagcaggactttggaggagcaagtgggcttggggggcggggcagggagccccaaatatactatggggatacattgctgacctcgggagacagcaggggggagggcggccaacaggaccaccacttacctctgggggcgagtgcacctgctgggtaccatggaccgtcagggagacctggccacctttgctgcctggggctgcgctctgcaccaccagacgctgcgtgggaagagcctggggccagggagggagagggagggcagatcactgatgacagcccgtgcagttgcaccgagcatctgcgcagtgccaggtgacattctaagtgcttcacgcctgttagctcacagaatcgccctgacagccctgatgaagctcggctactgcccccacttcacagagggtgacaccaaggctcaggacggcaaaggcacttatctgaggtcctaaagccaggaagcggcagagccggagttgttgtcaggccatgtggaatgtgctgtcatccttaaaacccaatagtcctaggctgggtgtggtggctcacacctgtaatcccagcactttgggagactgaggcgggcagatcacctgaggtcaggagttcgagaccagcctggccgacatggtgaaatcttgtttctactaataatacaaaaattagccaggtgtggtggtgcacacctgtagtctcagctactcaggaggctgaggcaggagaatcacttgaccctgggaggcggaggttgcagtgagccgagatcgagccattgtaaaacccaacagtactttgtccagatctgcgctgatcagtcggaaacgggtgtgcgcggcacctcatgcgcagccttctgggggacagaccaccctgtgctggctgtggactcctgactctaaacctggccttgggttctctgcttcgggacactgggttggacccgcaaaccaccttcccaactatacatcttgttctctctgctgagatggctcctgcagctcctctgtccctgatggcccctgccggatagtctcaccctggggaggtgactgcccagagccaggaggtagggcagcccctggatggggactcttccctccatcctggtgaggacagatccaggcttgccacagggggttggtcctccaccctgagggagccttccagggtggtggccaggtgcagcagcattacctgctggggcacttggatgttggtcagctggaggggcgacacgtggcctggcttggcctgcacgctcgtctggaccagcagccgctgtggagacaaggcaggaggagctgagctgccacttcccccagggaggcctggcgtggttgggtggcgggcggctgctgtgcacatcttgataagaacaggtgagcagatggctccagcaggaagcggggaggggaggtgaggcccccgaggacgcagcctgcactgcccccctcccgggccctcccccaccccctgggagggccacatcctacctgctgggtgccctgcacctgctgaaccacctgagtaggaacgccggtctggctggcggtggagccggggctggcctccgacactgtctcgctggcccgcatggcaccttctgtggggaggggccaccaggtcagttcttcctgctttccctgcccccagcctaagcctgagcccccctggaggggaagatgcagcctgaagccaacccccagcaaggtcaggcccctccaagagtcctgcttccccctggccagccctgactgcacccatcaggggcccacgtggcagagcgggctgaggcttgcaggacccaggatccttaatacctggcagcagccctcatcagctttcctcatcctgaagtcagaccagatagggtgactgaagagctatgatgctcaaaacccagaaggctggacccttcccagcagacgggacttgtggacaggcagggaactgactgtccactccagggtcctggcagcgctggaaggatcgaggtgctggggccaccttctctggggtgaccctggcttcccgggagtggaagctgctcggaggagtggtccctggaaggtcttgctagcctgtggccaagtcctccctccctgcccctctgtcctcagtggggtggggaccacaaggggcttggagtgggggaggcaggtactcacgctgacaggcagctgagaagagacaatcatagaacatggtgctcatcccctcccccaccccacccgccccccaccccgtccgcctgtccgtccaggggggcctgcctggccctctttgctccttgcctgcctctatagaacagcagggtgtgcaggtggctttatacccacgaccttggggcgctaatccccccggtggatgcagagagcctgcctgccctcttggaaaaacactcccctccccagcaaagcggggccttcgcggggctggggcagcgctgcggggtgaggagggaggttggtacccggagatgctatcaggcaggcacaggtcaaatttcatgcacatcttgctgagtgattagcaggggtgctgggggtagaggcgagtgttcccaagaggcgctggctagaagaccctcaccccagctgggacaccatccatcccatcccctccatgtgacctggcatacccccagcagctccagaggccgaggtggggctgggggtggacatgtacctgcccttcctccaccatcaaggagccaaggtcccaggcccacctttcttggggatttagaggggtttatccgacccccggcaggactgaagggccacgggcaaggagttatcactgcagacactagtgttgcttctggcacactaggtgttatgttagactctggacagccagagatagagcttttttgtttttttgagacagggtttcgctctgtcacccaggctggagtgcagtagcacgatcttggctcactgcaacctctgtcccctggggttcaagcaattatcctgcctcagcctcccaagtagctgggactacacgcatgcaccaccatgtccggctaatttttgtatttttaatagggactggggtcttgctatattgcccaggctggtctcgaactcttggactcaagcaatccacctgcttccatctcccgaagtgccggaattaccggcgtgagccactgtgcctggctgacagtaagagctttccgggatttttttttttttttgagacagggtctcacagttgcccaggctggagtgcagtggcgcaatctctgctcactgaaatctccgcctcccggttcaagtgattctcctgcctcaacccactgagtagctaggactgcaggcacccgccaccacgcccagctaatttttgtggttttagtagagacggggttttgccatgttggccaggctgctcttgaactcctggcttcaagtgatccgcccgcctcggtctctcaaagtgctgggattacaggcatgagccactgcacctggctgacagtaagagcttttattacccattttcagacaaggcaacagagaccagaagcaaggaagtgatctgtccaaggtcaaatgcaccatccaccgtgcaggccatgacgcaggttcccctctgggcccacacgaacctcataccacatatggaaccggagtcactggttctgcctgggctgcgccccaagggcagtgatgtgtgaacttgggtatatgggcacaggaaggaaagtaagctgggggtctacggggacccctcaaagtctgaagtatccagactgggtctcggctgtccaggcagggcacaggagggagaggggcctggacagggcaggagggctattcagggcagatgcaaaggccaagtcaagggcagagcgcaggagtgtgtgttgggggcgggggttgccagatgtgggaggtgttgggggaggcctccgcgtagccgcatgtgggctgtggggcatttggtcaatcccatgcctgcctgaccagctacctgtgcagccaattccacaggccctaatccctgtgttttgctggaatcttccctggcatctgctttaggcttcccagccctgagccataagggaggaggcccttgctgagagggcccctcctgggagaaacccgagacagccccgagtcatgtgaccggcactgcacacctgggtccgtggggtccaaggactcaggcccagcctaagggatggtgtctcacccaggaagctcaaggtgggcagggagtggggggctggccccccaccctctccagggctcaggggctggtcgctgagcaggacctacagcaggaggaggcctggggacctgctgagaccaggtggctgtctccaggaagcagccttgcccgtctcctgcctctggggtagccctcaaggctgggaccccgcctgccagcccaggagggcgccaggggatgcgccacgaggctaacaggtgagcctgagtgactcatgcggatgagggcttcctgtgcagccatccctgtctgcctgcggccggggcagggcccctccaccactgggtctggccctcgctgtgtttcagggaggagaagccaggaggggaagtggggggtggcactgagtctgcgagcgagcgtctgcatctatctgccggagatcgccactctgggcatgcgcaggaggccagggaggcccccactgtctcaggaaacggcggccgatttcctgtctctgaatctgacacattaacatctctgagcagtggaatgactctgacaagtgggcacccatcctccccgggccccgcacttccccatctagacctactcaaaccttaaatgagctacttgggggagcccaggggaggccctagaggctggactcctggcatccaccctgggggcctggcccccttccccatagacagatggggccacctgaccctctgcctcctgcccctgggctccctgggatgatgtcagtcaggggctcctggaggggcccctgctgcccccagtgtcctctatcccttgtctgctccaacctcagtttccccatctgtgcttgggaatgctgacaaacacactccacttctctgtctggacacaagtcttcttggcccccctagaactccaagtgagagagaagcagggaagaagggccggactcggcccctccttcggggcggcccctgttccctgcaggccggctcggtttcaccttcccaggagtggctgccagagcccacagcactctccttccgccttgggttctgggagagtctgatggcctctgaggacagggatttatggatctagtattgttcctgaccagggaaacttgatcttccttcctaccacctccaaagtcacctttaggcagggcaggcagggaccggggctgggtgagctgtgtctggtttggtgtcggctggtgtccagccccaggctccaagtctgggtccaggcccctcccttcctcttccctgccacctccctgggtccctggtcagctccgattgctcctggcttgggagaagtcctaggtgccttgtggcagccttcactggtgtcagttactcctgcttccccggcgctcacgtggccccggccacccttagatgaggaaggacgctaacctggcagagggtcagggaggaaggctggggagttactgcaaggggtgggggaggggacagctggcagggcacaagccaacctcctcttcctcagaacaaatccaggaagcattgcccagtgacccttctggggacaggctggcacctgccagaatgtggagtggcagggaaatgaaattccctgggaccactgtgaaaggcgactaagctaccgcctgaccaaagtgagccccagagagttctgtggacagcagggttgctacagcctgccctcatgggtacagagtaccctcctgggaacactaccaagatgggggagacagaggccacctccccatgcctaacagctacttagagtccggcctagctctgtctgacccaaagaccatgccttgctcttgacttgctcttgacttcttgctcttttttttttttttttttttgagacagagtcttgctctgttactcaggctggagcgcaatgacatgatctcgactcactgcaacctccacctcccaggttcgagcgattctcctgccccagcctccccagtagctggtgctacaggcacacgccaacacgccgggctaatttttgtatttttattagagacggggtttcatcatgttggccaggctggtcttgaactcctgacctcaggtgatccgcctgcctcagcctcccaaagtgcggggacttggtcttgactttgaagcaccagggcccccctgagggagtgcgggaagagctggagaagccaaggtcaagagtggaaggacttggggagtggtggagcctggagctgtgtgcccactccagaccctggctctagggagcctggaccctgaagcaggtaagacccacacccagggcgtggatcaggacccatcagacactctgggcgccaagcagagccatccactggtgacatgcgaggcctcctgcaaacagtcagccatgcaggagctgatgggacatgatggctgtgctaggtgctcctctaggctgttctgggtcaggctggtgctcctcagtcattccacagagactgagcactgacagagccctgcctgcaggtgggcacccccaccatcccattattgtaacttcaagtagtgttaagtgttaagaagaccagcggggcgcagtggctcacacctataatcccagcactttgggaggccgaggcaggcagattacttgaggtaagaagtttgagaccagcctggccaacatggcaaaacgccatctctaccaaaaaatacaaaaattaccctggtgtggtggtgcgcccctgtaatcccagctactcgggaggctgaggcaggagaatcgcttgaacccaggaggcagaggttgcagtgaactgagatcgcaccactgcatccggcctgggtgacacagcgagactttgtctcaaaaacaaacaaacaagaagacagagagtgagcaatgggggtaggggcagggaggtgtggagtcagaaaggtagtgtctgagcagcgacctaagggagacaagaggcaagctcccagagggtctggggcagggagtgctcctggcagagggtaccgagagtgcaaaggtcaggaggcaggactgagcctggcgggtttgtggagctgtaggaaggcaagaggggctggaccaggtatgtgaggggatgggtggaagtgggcgaggctgggaggctggcaggccagagttgaaggggcttgacatttgctagtaggggcacagggtgtgtggagcatttttgcattttgtttttgtttttttgtttttgagacggagtttcactcttgttgcccaggctggagtgcaatggtgcagtcttggctcactgcaacctccacctcctgggttcaagcgattctcctgcctcagcctcccaagtagctgggattacggcgcccaccaccacacccagcttagagagagagagagagagacagacagacagacagacagacagacagagagaaagagagtgtgtgtctgtgtgtgtagcttttaaagtccttttttgtcaggtatcgggggaggggaaggagcctgctctcccagagctgagaaagcctaggctggggtttctcaaagagtgcccatggaaccacctggcttggagccatcagggttgagctaggatgtgacgggacctaatggacagttgtgaacctgctccctctggctgctgggaggggtcagactgtgagggcggaggctcgaccaggattggggtcatagaagtggaagaggcggggggggttctggaagagtttaggaggtggagccgagaggtcttactcaaggaggagtaggacagaaacaagactgaccgtgggcctgggaggatgagaaagccttgaaggagagatttgaagagggaaaaatgcagaattcaatgtggctgcactggcctgcatcaaattcaacaccaagtggatgagtcaggaggggctggatgtggggtcctgcggttcagggttgcagcccaggctggagacctcagtgtgggtaatgagagctgggacacaggatgaggccatcgttaagggagaactacaggagctaagagaggttcccaggtctgagtctggggctccccgtcctttgctgacaaggtcagggagatggggagaagcagcagagaggaccacggaggggctgcgggcggtgggcggagaccagggcagtgtgggctcctggaggcctcacaagaggggatctttgggaaaaagggggccagctgcagggggtccagcagctggaggttcctggagaaaatgggggcttggctgggcgcggtggctcacacttgtaattccagcactttgggaggctgaagtgggagaattgtttgaggccaggagttcaagaccagcctgggcaacatagtgagactctgtctctacaaaaaaattaaaagattaggccgggcgcggtggctcacgcctgtaatcccagcacttttggaggccgaggcgggtggatcacgaggtcaggagatcaagaccatcctggctaacacagtgaaaccccgtctctactaaaaatacaaaaaattagccaggcatggtggcgggcacctatagtcccagctacttgggaggctgaggcaggagaatggtgtgaaccccggaggcagagcttgcagtgagccgagatcctgccactgcactccagcctgggtgtcagagcgagactttgtctcaaagaaaaaaaaaaaaattacctgggtgtggtggcacatgcctatagtcccagctacttgggaggctgtgagagtatcactgagcccaggagttggaggttacagtgagccatgattgcaccattgcactccagcctgggcgacagagcaagaccctgtctcaaaaaataaatacataaaaaataaacaaaatgggtgctgttccaccttgatgggtggatgggaagatctgcaagagggggattaagtgatgcagaaggaactagaaggagcaatggcaggagcgtgttctggatatgggtggtgctgcttaatccaagaaggcaaaggtggtgggtgcagatgcaccccaggagctgggcaggagaaggggtccctgtggctgcctgatggtactctgtccccagtaaggttgcctgcagggtcagggaccaggatcatagtataagacaaaggtgatggaggtgaaggtggggcagagggagaatgggtttcttggagcatgaagttcactgttaaggaaatgctgcaggatttctgaggggtgctgagaacccaccagaggtttgtggcctgaagaccctgcccatgactgcagcccgacctcaaccagggcagggctgtgtctacacaggcgggggggcactaagtgtggcgctcatgcggacacctccactccgtccatatagtaaagagtcactgccctgagtccctgcatgttcccgccccaaacctctgccagagaccctggacctcccacgcagacactgccagaagcctctgggacactgcccagggctccagccccatctgctttgttccacaacggggccaattgctacacttttcattactttttttttgagatggattctcgctccgttacccaggctggagcgcagtggcacgatctcagctcactgcaacctctgcctccgggttcaagtgatttttcctgcctcagcttcctgagtagctggcattacaggttcgcgccaccacgcccagctaatttttatatttttagtatagatggggtctcaccatgttggccaggctggtctcgaactcctgacctcaagtgatccacctgcctcggcctcccaaagtgctggggttataggtgtgagccaccacacccggccaattgctacatgttttgatgactctttatgacctgatggtccccaatcccatcttgacccaccccttccacagcccctcaggatgccctgatgatctcaccccttccattcccactctgagaaggaccagggccagctttgatccgggctcccactgaggcctccgtccaccacagagcacattaaaaacacactagctgtgcacagtggcaggcgcctgtagtcccagctacctacaaggctgaggcaggagaatcacttgagcccaggagttcgaggtcagtctggacagcatagcaagaccccatctctaaaccaaaaaaacacacgaatctagcctaatgcccaggctgtgctgccattcccaccagagcactgagtcagtcgagacagagacccagccctcaggcagaccctaaaccagtcaaaacatcgtcactatgtttactgtgggaaatgctcagagggcaacaggtctgtccaagatggcctgctctcaacacaggtcctgcgtgccttagcttatgtcatgagaaagaaaagcaaaaataaagaaaagggccagtccctggatcctgcccaaaacaacagggcggctgctctaggaaggggaggtgacatgtccaggccctcacccccagctgacctccctgaagtgcccactcaaggccatcctggctatgagaccctcgcatgcgtcccctgagagagaggagctatgatgatcccatcacaaatgaggaaaccagagcagggaggccaaaagactggtgtgtagccaggccaggcctctgtctcccacaggtgcatgcaaactttgatgccactgcccaaacccttcttccagtgacatcttatttgcaaagagaggtcagaacagctctaagaggctgagcatggtgactcatgcctgtattcccagcactttgggaggctatggcaggaggatcgcttgagtccaggagtttgagaccagcctaggcaatatggcgagacctcatctctacaaaaaatacaaaaaaacaaaaaaattagctgggcacagctgcacacctgtggtctcagcaactcaggagaccgaggtgggaggatcatttgaggccgggaggatcatttgaggccaggagtttgagacctgcctgagcaacatgggaagatcccatagctacaaaaaattttaaaaattagccaggcatggtggtgggcacctgtggtctcagctacttgggaggctgaggtggaaggattgcttgagcctggagggttgaggctgctgtgagctgtgattgtgccactgcactccagcctgggcaacagaatgagactctgtctcaaaaaataaaataaaaccaaaaaaagaagctctaagagctgctctggtgggaaggagtttggggggacagaggcctccttgcatggcttaagcacccctgccctagtgataccccaagtcccatccagaaaccttggggggcatggcagccctgtgccttcacacccagggtctaggctatctgaacaactctgagaggagttttcaggacacacgagcgcggcacttaccagagacagtgaccacgatgtactgctggggtgcaggcgaaggggtgggtgcaccggttggctgcgagggtgcgggtacagccgggagctccgtcacgtactgcttctggccacccggtggctgtgcctggggctgggggctctgcagctcggtgacatattggggctgaggggtggcagcagcggtgggtggctgcgggggctggggtgccgctgggggtggtggcggtggcggctggggctgggcttgtggcggggcctgtggcggctgggatggtggcggggctgcctgtagctcagtatacgcctgtgttgccatgccaacggtggggaaaatgataataaataaggcttttttttttttttaattccttgggaagaaagacggggatgggggagagaaaaacaaaacaaaacaaaagaaggaaaaacaggaattaatccacaggcagagaaagcagggacagctctgggttccctggagatgtgcttgggttcatcactaacttaattaaatccccaggctggtggccagaaatatccaacccgtcactgcagggggaccagctgtagaccagggctggagccccactccgcacccccactcaccccaagccaggactcctgccttcccagtccctggtacccagagacccccacatccacataggatcgcatttccccacactgcgggggaacttgggcctgtgtggttgctctgtgccctcacccagagaaaaatggtacggttctcactgggtcactctcaactaccaggggctgccccctcccttgcctccatctccttagctgaggaccccaagtgggcacttcctgagggctcttgtaggccaggcacagggctgggcactttccctatgttagttcatctttttaaaatgtctattaggccgggcacagtggctcatgcctgcaattccagcactttgggaggccgaggtgagcggatcacttgaggtcaggagttcgagaccagcctggccaacatggtgaaaccccgtctctactaaaaatacaaaatttgctgggcgtggtggtgcatgcctgtagtcccagctactcaggaggctgaggcaggagaatcacttgaacctgggaggcggaggtggcagtaagccaagattgcaccactgtactccagcctgggagacccaagactctgtctaaatatatatgtgtgtgtgtgtgtgtgtgtgtgtgtgtgtgtgtgtgtatttttttacttatatattgaaatctacatgtacatatatatacatatatagtatatatatacacacacatatacactgtatacatatatgtacacatgtatatatattgtatatgtatattgaaatatacatacatatatatatatatatatatatatatatatatatatatatatataatcatttttttcagagatgggagtctcattatcatgcccagtctggtcttgaactcctgggctcaagcaatcctcctgccttagcctcccaaaaagtgctgggattctaggtgtgagccaccacgcccggcctatttcattttaaactttccaacaaccatgtctgggtttgggttctgtctgctagatagggagctgaggctcagagaggttaaggtgcttgccccaggccacacagcggggaagtggtggcagggctgcatttgaactctgggtgttctatgctcctgactcgtcagtttattgccggaaagcagagtcatggggaaagctgcctcccagggacccgtgccagttccctacgtgcctgccatctggacttgggattctcggctgagtagcattcccagtgggaaggtgttttgagtccaaaaagcccctgtgagctgcatggggccacaggggctttttgggccctctgtctgggagcagttatgggtcttgacaccagatgtaagctcatcagtgggacagtgcccttctgtggccaggggtgacagggctgggagcaggcccaggctgcactgagaacctggcagctgcggctgacttcagaacagggccggccttggccaagcgcagtggctcacgcctgtaatcccaacactttgggagaccagggtggctggatcacctgaagtcaggcactcaagaccagcctggtcaacatggcgaaacccagtctctactaaaagtacaaaaatcagctgggcatggtggcacatgcctgtaatcccagctacttaggaggatgaggcaggagaatcacttgaacctgggaggcggaggttgcaatgagccgagatcttgtcactgcattccagcttgggcaacaaagtgacactctgtctccaaaaaaaaaaaaaaaaaaaaaaaaaaattaaacgggagtggtggcgcgcacctgtaatcccagctactcaggaggctgaggtgggagaattgcttgaacccaggaggcagaggttgcagagagctgtgagccgagattgttccactgcactccagcctcagtgacacagcaacaccctgtctcagagcaaaacaaaacaaaaggaaagaacagggcaggcctggctgttaaagggtgtgttcctctcccaggtgctgggctgggcatggcctccctccggctcagccccactgtagcaggggatcggcagatggtttggggacccttgtactcataagccctatccccaggtccaaagcatttgagggacagtgggacagaggcacgagtggttaagaggaaaggctccagatccgtgcttttgtggctcctgcctggccccagaaggcatttgggtctgagagccctgcctgcagctggccatgactccgggcagtactgcctcctggctagcaactggaccagagcctcttctgcactaacactcagcacccatgtgccacgatgtgcccagatggccctccagccgcagggtgaccctcaaaggaaggaggaggtaaaaaacaactgctgttggttgaccaggagcccccagacccctccactgaggtcacctcctcctggcagtcgtatgagggaggcatcatcatgcccattttacagatgagctgagcgaggctgaggggtaggctgctgaaagcctcgagcaactggtgaggggggattgaacccaggtctctctgacccccagatacattctgtcagtccccaaccctacttaggatgccaggcacagggctcatttgcttttttttttttttttttttttgagatggagtatcactctgtcatccaggctggagtgcagtggcacgatcttggctcactgcaacctctgcccccacgggttcaagtgattctcctgcctcagcctcccgagtagctgcgactacaggagcctactaccacatccagctaattttcgtgtttttagtggagacagggtttcaccatgttggttgggcaggtcttgaactcctgacctcaagtaatccgcccacctcggcctcccaaagtgctaggattacaggcgtgagccaccgcgcccaaccttcatttgcttcttaaagtaagtacacggcatcttgccggtcttccaacagggagacccaagcgtcacctgcaaaggttacgccccctgcccaaggccgcagttaagggcagcagaactggcaagggggaagccggcccaagcagcccaggggaggctggttcccatccttcacgcctccctgtgcctccctcccccgggatccaggttctgctcttggatgccaaactcaagaggtgtccgagttagcaggggggcaaggtaggtaagaaacgagccctggacggggatggatgcaccacgatttgaatttggctatctcctaactgtgtgacttttgaggagagcccctacggctccatctgtgaaatgggaggacggctggccctaccaggcggggctgctgagggttcaagctgatcctgtgggcagtgtgtggccaggcacctggcatgctgtaagcacgcaggaaatggctctggctccttcactgcccagggccctttaacgcagttccaggaaagatgaaaataccttctggccctgcctgctgccttccagcctccagagctttgtgctgctgaggatgaaggaaacaggagcttacacttgcctcttggatgtgccctctgggcttgcggcaggcttgggagggactccaggaccctcctggctggcaggaacagagctgacagggccctggggccaccctccctgccaggtgaggtcattctggtaggagtggaggcaggcaggatgagaagccgtttggggccttcccacctagcaggtggccagccttagtgctccgaggcccagggactcgggcagcagagaaacttgcccaccgtgagagggaaaaggctgctgcctgccttgaacaaggcgaagaccatcctcctccagcccctgccctccccaaactcctttctgccagcattagaggggtggaggttcctcacaccatcgggtccaaatctggcccagctcgggtactcaagtcactgtagccgacgacccttcatctgtctggtgtcagaccctcacccacatgaaccctggcgctatgtcttaactcattaacatattaccaaccttcttctgggcctcagttgcctgtcacctggggataacgagaacacccaattcatcaaattgctgcaaagatccaatgagatcaggccgggcacggtggctcacacctataattccagcactttgtgaggcctaggcaggtggatcagctgaggtcaggagttcgagaccagtctggccaacatggcgaaaccccgtctctataaaaatacaaaaattggccaggtatggtggcgtgtgcctgtagccccacctattcgggaggctgaggcagaagaatcacttgaacccaggaggcagagggtgcagtgagcagagatcacaccactgcaatccagcctgggtgactgggtgacagagcaagactctgtctcaagaaaaaaaaaaaatccaatgagatcagctcagcacccaataaacactgataagtggcaggtgttattattcattcaacaaatatccaagccaggttgggacagaggaggaaggagacaggatcttcaagctcttgggaggggacaccaagaggaaatccaacctaagctttcgtcagcaacatcatgcagattcctgagctctactgcccagtgagtctgaaatggccccagagtctgttttagctggtcccttagatgattctgaggcagacagtcctgacagcactctgagaaatgctggccttggctttctcagccctaagagacctggccccttgtggcccctcccacaaagaaagggctttaaaagctcctcacttactggctctttctcctcctagggatacaaagcccatgggcctcatcccttccactcaggggcaagaagaggaggcaatgattaatttctaaaaggctgagctcaaaaggaggaggtgggagatcgaggaacaactaaaccaacttctctattggaggccttctcagcactgtgattgtcaatctttttcctacaattatttgaccaaagagcccttttctaccttttaaggagactacattaagcaattatacaggtttgttccctagagagaaataaatcacatatacatacatagcatgaggtattgcccatatatttgagcgtgagaaccctttctttatggagcctggcacacaaaacaagggaattacttaacaaactgttccttggcaatgaatctgccaagaaaagcactagtggctgcacctaccttcaaagccagcagctgcttatggagactgtttaaatctattactttaaatgagggctcggcaaagttctgtaagggccaagcagtaaacgttattagttttgtggctagtctctgcagcagctgttcaactctgccactgtaatgtgaaagtggccatgcacaataggtaaacaaatgagcaggctgtgtgcgaataaaactttatttctagacactgagatttgaacttcatgtaattttcacatatcatgaaatataattccggtgttgatatttccaataatttaaaaatgtaaaaatcattcttagctcaccagccaaaaacaggcagcaggccatagtttgttgaaccctgtgttttttttttgtttttttttgtttttgaggcaaagtttctctttcgttgcccaggctggagtgcaatggcacagtctctgctcactgcaacctctgcctcccgggttcaagtgattctcctgtctcagcctcctgaggagctgggattacaggtgcccaccaccatgcctggctagcttttgtatttttagtacagatggggtttcaccatgttagccaggctggtctcgaactcctgacctcaggtgatcctcccaccttggcctcccaaagtgctgggattacaggcatgagccaccgcgactggcctgacccctgttttggatgccagattctctaatcaaatggtttacatcctcagcaaggccctcccaaagatatagaaagaaaactcactctcttcatctatagaatggcttcaataatgaacttgcagaagaatggcaaaattaaatgggatgatgtgtgtttctctcatcctctatatccaattcatttagaagatttgtcaattactcctccaaaatatatcctagaggccgggcgtggtggcttatgcctgtgatcccagcactttggaaggctgaggcgggcggatcatttgaggtcaggagtttgaagccagtctagccaacatggcgaaaccccgtctctactaaaaatacaaaaattagctgggtgtggtggtgtgtggctgtaatcccagctactcaggaggcttaggcaggaggatcgcttgagtctggcggggcagaggttgcagtgagctgagattgtgccactgcatgcatacaaacacacacatacacatacacatacacacacacacactcgcacacatctcctaatgactgggcgcagtgctcacatctataatcccaccactttgggagtccaagattggaggatcacttgagcccaggagttcaagaccagcctaagcaacaaagtgacgccttatctctataaaaaagtgaaaaaatcagctaggcatagtacccgacacctgaagtcccagctgctcgggaggctggggtgggagaatcacttgagcccaggagttccaggcttcagtgagctatgatcacaccgccacactccagtctgggcaacagaacaagaccctgtctctttaaaatatatcctggacaggcatggcggctcacgcctgtaatctcagcactttgagagcccagggcaggaagattgcttgaggccagaagtttgagaccagtcttagcagcatagccgagactccatctcgacaaaaaaattttaaaaattaggtgggcgtgatggcgtgtgcctgtaatcccagctactcgggaggctgaggtagaattgcttgaacccaggaggcagaggttgcagtgagcctctctgcaaaaacaaaaaaaacaaaaaacaaaacaaaacaaaaaaatgctgcagatccattcctgcctctcatggcctcggccccacctcttcctcccacctggcatgctgtccccaccgccaccttcacggctggcttctcctccttattcaggtctcagctcgtacacacttccttgggtctgaaggtaccctcaagcacatactactattttatttgcttcctgacactgtgtttccctgttgagtttattttctttctttttcgtttcttagagacaaggtctcactctgttgcccaggctggagcacagtggcacaatcacagctcactgtaaccttgaattcctgggctcaagtgatcctccggcctcagcctccacagtatatgggaacgcaggcctgtgccacgacacctggctaatttttaaatctttttaagagatggggtctcgctatgttgcccaggctggtctcaaactcctgggcttaagtgatcctcatgtctcagcctcccgaagtgctgggattacaagcataagccactgagtctggctggatttattttcttcctcctagttcctcttccctccctgactggaaaggtaagggccccacaggcagagacctggtgggcctggtctctgtctcagctcctagaaaactgacaggcaaggccgggagcagtggctcacgcctgtaatcccaatattttgggaggctgaggcgggcagatcgcctgaagtcagaatttcaagtctagcctggccaacatggtgaaaccctgtctctactaaaaatacagaaattaggctgctgcggtggctcacacctatagttccagcactttgggaggccaaagcgtgtggatcacctgaggtcaggagttcgacaccagcctggccaacatggtgaaaccctgtctctactaaaaatacaaaaattagccgggcatggtggtgggtgcctgtaatcccagctactcgggaggctgaggcaggagaatctcttgaacctgggaggtggaggttgcggtgagccaagattgcgccattgcattccagcctgggcaacaagagagacactccgtctcaaataaaccaaaccgaaacaaaacaaaaatgagccggtcatggtggcgggcatctgtattcccaggtactcggatggctgaggcaagagaactgcttgaacccaggaggtggatgttgcagtgagccaagatcgtgccactgcactccagcctggatgacagagtgagactctgtctcaaaaaaaaaaaaaaaaaaaaattagccaggcatggtggcaggcatctgtaatcccagctactcgggaggctgaagcaggagaattgcttgaactggggaggtggaggttgcggtgagctgagatcacgccactgcactccatcctgggcgacagagtaggactctgtctcaacaaaaaaaagaaagaaagaaagaaaaaagaaaagaaaactgacaggcaaatagtgggggttttgactcttactgtccaggcagcataaatgatgcaccagaacacactgctagtgagcatcaaaggcaggttccagtctatcaactgctgagaccgtgtgagaaagttacttcctgccacaagcctgcttgtgctacagagccaggcaatgccttctggtccagaacaggcctgggaagcaggtgggagaaagtctttctcgcctaggaagaccacgtcctgtacagctgctattgaaggcagcatctctgcgggcggggcagcctggccatccccttccctgagatgctcaggtacatgacagaggagaagggtgaggacctcggctccagagacgccattccaagctccccaccgttcccacaatgtccacatccccgctcacccagctgcctcctggaaggcttgggactgtgtctgggcctgagcccaagtagcattttgtgtgtgtgttttgagacagtcttgctctgtcacccaggctcaagtgcagtggcacgatcttggctcactgcaacttccatctccacggttcaagggattctcctgcctcagcctcctaaatagctgggactactacagtcatgtgctaccatgcccggctactttttgtatttttagtagagatagggtttcaccgtgttggccaggctggtctccaactctttacctcaagtgatccacccaccttggcctctcaaagtgctgggggagtgagcacccaaattgagccactgtgcccggccaggatttttctttctagtgactctcctaaagccagagaacagccattcagcagccaggggagtgactttcccactacaaactggatccctggtatccagcttcctggatccctgtcatcgacccacacagcccagcaagcgagaagcaagtcaacctttaaagccacgagggctctcactggattcaaaatgataaaaataaaagccaacggtgtatttccgagggttgaacaggaagcgacaatcaccgtaacagcagaggctaacataactacattagcaattactttgtatttagttagtttcagcaattcctatgtatttgatattcaacaggtattattttctgggatccatagcacagaaacatgagattgaaaggactaccaaggattactgcccctagatgaaaggaagggaaactgaggcccagaaaacttaagtaactcacctaagagcacacagctagaaaagctgactgtttcaagtcagcttcaaatcaccctagtgttctcttcctagtcaaatgactcctcaggcccttcatctgtaaatgtaactggtgactgaggcagtcaacatgaccagataattggtaacatcactttctgctcagttagcttttttttttttgagacaagtctcactctgttgcccaggctggagtgcagtggcctgtgatctcagctcactgcaacctccgcctcccaggctcaagcaattcttgtgtctcagcctcccgagtagctgggattacaggcatgtgccaccacgcctggctaatttttttagaaacagggtttcaccatgttggccgggctagtctcaaactcctgacctcaggtgatccgcccacctcagcctcccaaagtgctgggattacaggtgtgagccaccacgcccagcctgctcagttagcttttttaagaagggctagccgggcgcggtggctcacgcctgtaatcccagcattttgggaggccgaggcaggtaaatctcgaggtcaagagatcaagaccatcctgaccaacatggtgaaaccccgtctctactaaaaatacgaaaatcagccgggcatgatggcgagcgcctgtagtcccagcgactcaggagactgaggcaggagaatcacttgtacccgggaggcggaggctgcagtgagccaaaatcaagccactgcactccagcctggccacagagtgagactccgtctccaaaaaaaaaagtgctgatgatccgtctagcaacttggcatttctagcttttttgtttgttttactgaaaattaatctccacctgtcctaactttcaaagagtccctgcctcctctaaaaagggccaggcctagaaaaagtacctggagaagttaggacccgccaacccccaccagaccaatctcaaactcttgggaaaaagcctgaaatgatccttttccttggaatgtattgactgatttaaaaggaaatggctgcagtttgcacaccgacactaagctcaaaagcaagacggagaataagccaactagacttggcctggctggctacttaaaaaaaaaattcctccccgagctggcaggatattgtcaccctaaaaagcagtggcaaagattctcctctcacaaacatggatagcttccccttccctctgaccgctcctgcccacgtggccctagaggctgggaccttgtcagtgacatgtgactcggttgacactcgtttgacacaaaaacatgtgtctggccaagagaagcgggtttaaaaaatctaagaaacttcctcaggcttcatttgctcccccattcccagtaggggagacctcgatgggcaggacccagaaacgttccatctccaggaacaaacccccgcaacctcaaaccaggaaacatcaggtctcaaacagcagcccagagaaaagcactcaggtttctgttcctctaaagcattccctcatggtcactcctccctaccatggactttgatttctgcaaaccagatcctccacgctaaagccaaatcgactcctagctcctccatgaaactttgcttcctctttgcttcctcccagagagaaggtggcaggtttaggagtgggctgcagtgttgaaatcaggactagctgacagttattttatcaaaccacattcagaaacggtagatacgaggaaaaggttcaaagataagccgtaagtaaaattcctggaaggaatgaggagtcccggtactgcaggaaaagggcgatgtcaatgattctccccattttacaggatggaaaactgaggcctcagatggacaggcacttgtccaagttctgagtcctgggacaactgcaaagctcttaaggaagaagggagtcgcttaaggatctggaaggcggaccgggtggtggctgcccaccctggttcccgaggtggaggttggggagacccagccggccccgcccataccttccctcctggtcccgcccacccaccttggccccgcctcgtacctccctcgctcccattggcccagcctccccaggcccgccccttcgcgctcccgacatataaaagccccccgccccggcctgccgacctccactcgccgcgggcctgcgagcgcccgcccctcgcgggggccgggccgcggggacgggggcgggtggtgtcgttccagccgggccccggccccctcccccacggtccagacagtcgccgccgccattttgaccgcccgccccttccccccggactgtgattacagagacacctactgccccggccccgccgcccaccccggcccggccagccaccccggggccgccctggttacctccgcttctccccacttctgtctgcggaaacgcttttcggaggtctcggagtcgatgttgggaaggggacgggacgtgctggggtccccgggccgggcctggggggtgggggtgggggtcggccgggcggttgttgttgttgactcgcgttgccgggttgcttggtcgccacgactaccgtggctatggcgcctccgtttccctcaccggggcaactgttgctacccaccctagttacgtcacgcgcgggggcggggcccggggtgattggcggcggccggagaagtgattggacggcgccaggccttgcagctaaactattagttccgatgcacgcttttcaacaccctctggacttcccggcgatctgatttatcagtatgaatgtccatcaaaagaaactgaaccctcaaaggcagccgggcccgtcactccggcagggaagcagctggttaagaataaaggggtaggactcgtgaggacgggattggtttgccgatgtaaaaccggcctcctggttcgactaaagggacgtcaatctaccaaaggtttgccgcgctctctggctggaggccgtgcgcatgctcggcacgcaaggccgattgggagttgtagtccgctcttgcgtacactttacatgtcttaccaaattaaaaaggcgagaaaggaagactccgctccagacttctctctcgctcggtgggccagtttctggcttcttgcgctgacgtcaggggaggaatgcagtgacgcagcgcagcccctctgtgacgacagcggcgaaggccggactcgggattcgatgacgtcactgggcgcgcgtcccccttccccactgcccatggccccgtcggggttgggtggaagcgggaggccgcggcggggttcgatcccagctcccacccgctggggtgacatcctcctccgcccaagccggccagacagcgcggccgccgcgccttctcccgcctcccggtcccctccagccggaaaaggtcaccgctgccggggtgaccgcggctatctctgccccgcaggcggtgcggccgccttgggaaaggtctctgcaaggcgggggacttcattcgcggcttcaaccgcggtagataagcaaaggtcagccccgacccagcccagggagcttggtccgcccaggagagctcaccacaacccccgccacacacacacacctcccacacatacgctcctctgtgcctcagtttcctcaagggactgtctgggtgctgcaggacgagaagagacagaaacagggcccggactagggtgaacatcttgggagcaaaaactcagtcatcaagataaataatcttctaattcaatatttgttaaatatccaaattaatgggaaaaaataaatctatgatgaacaaaacatcacaattttaaataaagacaggatccgccaacacagggattaaggtgagatgcgttatgcaagctcagggtcagatcttgtgtttaaaataaatttattattattattttttgagacggagtctcactctgtcgctgaggctggagtgcagtggcgcaatctcggctcactgcaagctccgcctcccaggttcacgccattctcctgcctcagcctcccgagtagctgggactacaggtgctcgccaccacgcccggctaattttttgtatatttagtagagacggggtttcaccgtgttagccaggatggtctcgatctcctgacctcgtgatccgcccgcctcggcctcccaaagtgctggggttacaggcgtgagccaccacgcccggcctactttttatgttttaaatgtcaattatcttatgactgagctctttggccttctcttaaattttgcattctcatcccaggtaggccctagaacagcaaggggaaaagaaaacaggctcagacagccctgaagtctaatgccagccctgctgtgtggcattcagaaagtgactccacctaagtttgtttcctaattcaaccaacattatatttcctcggtgcaaggccctgggctatacaagtgaagaaaggtgacttcatttatggtggctcacacctgtaatcccagcactttgggaggccaagcaaggaagattgcttgagccaaggagttcaagaccagccttggcaacaaagcaagacacccgtctctacaaaaattagctgggcatggtagtgtatgcctgtaatcccagctactccggaggctgaggtaggaggattgcttgaacccgggagggggaggttgcagtgaaccaagattctgccactgcactccagcctgggcgacagagcgagactttgtctcaaaaaaaaaaaagcaattagctaggcgtggtggcatgtgcctgtggtcccagctactctggaggctgaggctggcaggattggttcagctccggaggtagaggctgcagtaagcaatgattgtgtggtccagcctgagtctcagaaaaaaaagaaaaaaaggaaaaaaaagaaagcaaacaactccctttgcattctaggatgggatacacaataaacagataaattgtaagataggctccttagagtcctgagagcaacataagagagtggggtaggagaatgagaggatgctgtagccagtgttatctgaggggggatgtcccacagaatgagcctgagtggtgagagacgaagcaagcctcataaatccaggtggaggggccggtcatgatggctcatgcctgtaatcccagcactttgggaggccaagttcaggagttccagaacagtctggccaacacggcgaaatcctgtctctactaaaaatactaaaataggtcggtgtggtggcacgtgcctgtagtcccagctactggggaggctgaggtgggagaatcacttgaacctgggaggcagaggttgcagtgagccaagatcgcgccactgtactccagcctgggcaacacagtgagactccgtctcaaaaaaaaaaaaaaaaaacggggggagagaactgccttcaaagctgggaacaggaacttctgctaaagccaggagagataaggttgtagaggtaataatagccacataattcccagcgaacccagcaaagtgggacgctccccgctcttgacaggtgggcaatggatgcccagagagaggaagtaggtgccctctctgccagaggcgtgtgaaccagagcaactccatcttgaacaggaactgggtaaaatgaggctgagacctgctaggcttcattcctaaatggttaaggcattcttagtcacaggataagacaggaggtcagcgcaaaatacagttcataaagaccttgctggctgggtgcagtggctcatgcctataatccgaacagtttgggaggcggaagtgggcggatcacttgaggtcaggagttcgagaccagtatggaaaacatggcaaaacccgatttctaataaaaatacgaaaattagatgggcgtggtggtgggcacctgtaatctcaactacttggaggctgaggcaggagaatcgctcgaacccgagaggcagaggttgcagtgagccgagatcaccccactgcactccagcctgggtgacagagtgagactccatctcaaataaataaataaataaataaataaataaataaataaataaataaaaataaagacctcgccgggcgtggtggctcacgcctgtaatcccgtcactttgggaggctaaggtgggcagatcacgaggtcaggattttgagaccagcctggccaacatggtgaaaccccatctgtactaaaaatgcaaaaattagccgggtgtggtggcgtgcgcctgtaatcccagctactagggaggctgaggcagaattacttgaacccgggaggtggagagtgcagtgtgccaggatcgcgccactgcactccagcctgggtgacattgtgagactctgtttcaaaaaagataaaaattttaaaaataatttagaaaaatacataaataaagaccttgctgataaaacaggttgcagtaaagaagctggctcaaacccaccaaaaccaagatggccatgagagtaacgtctggtcctcactgctacactcccaccagcaccattacagtttacaaatgccatggcaacgccaggaagttactttatatggactaaaaacaagaggcatggaataatccaccccttgtttagcatatcatcaagaaataaggctgagtgtggtggctcatgcctgtaatcccagcactttgggaggccgaagctggcagatcgcttgaggtcgggagttcaagaacagcctggccagcatggcgaaaccccgtctctacttaaaatacaaaaattagccgggcgtgtggcgcatgcctgtgatcccagctactcaggaggctgaggcaagagaattgcttgatcccgggtggcagaggttgcagtgagccaagatcacaccactgcactccagcctgggcaacatggagactccatctcaaaaaaaataaaaaaaaatacagccctcgaggctgctctatggagtaaccattcttttattccttacaaatttgcttccactttacggactcacctggaattcttttttttttttttttttttgagacggagtctctctctgtcacctaggctggagttcagtggcacgatcttgactgattgcaacctccgcctcccaggctcaagcgattcttttgcctcagcctcccgagtagctgggactacaggcgagcgccaccacgcctggctaatttttgtatttttagtagagatggggttacaccatattggccaagctggtctctaactcctgacctcgtgatctgcccgcctcggcctcccaaagtgctgggattacaggcgtgagccaccgcaccaggccctgaattctttcttgcgtgatatccaggaaccctgtcttggactctggatcggacccccctttcctgtaacatctccaccccaagatcacgaagctggaggaaccagagcccatctcttttcatgggactttccagtgccctgggtgtgaccctggatgggagaagaggagaagcagcagctccagtctgcctggaattgccggttgagtcccagccctgacagtacctgcaagaattaatgagacttccaggcaggcagtgcccaagaatgaatcccagctggcaatacaagtcacatcagggtcccaggaccagccatggggacttcattgtggggagggaaactagaagccctatttccacctcctacccatttctccaatgcccagaagtagctggaccaagcccagagaccatgtcgtccatcaaaaatattcagctgggcgtggtggctcacacctgtaatcccagcagtttgggaggcctagactggcggatcacctgaggtcagcagtttgagaccagcctggccaacatggtgaaaccccgtctctactaaaaatacaaagttagctgggcatggtggtgtgtgcccataatcccacgtacttgggaggctgaggcaggagaatggctggaacctggaaggtggaggttgcagtgagtcgagatcgcgccactgcacgccagcttgggcgacagagagagactctgtctcaaaaaaaattcattataagactttgtggctggaaatgcaaggtggaggctgaaatgttctatatttttatctggtggaggttgtacagcatatagtcagccctccctgtatccacaggttacacattcattggaagattcaactaactgcaaatcaaacattcaaataggccgtgctctggtactggtataaaaataggcacataggccgggcgtggtggctgaagcctgtaatcccagcactttgggaggccaaggcaggtggatcacttgaggtcaggagttcaagaccagtctggccaacatggtgcaaccccgtctctactaaaaatacaaaaatcaggtgggcgcagtggtgggcacatgtaatctcagctattagggaggctgaggcaggagaatcgcttgaacccgggaggcagaggttgcagtgagccaagatcgcgccactgtactccagcctgggcgacagagtaagaccctgtctaaaaaaaaaaaaaaaaaaaaaaaagcacatagaccataaacccaaatacttaacagccaactggtcttcagcaaagcaaacaaaaacataaaaggggggaaaggacacccttttcaatagtaacgccaggataattggctagccacatgtaggagaatgaaactggatcctcatctctcaccttatacaaaaatcaactcaagatgggtgaaggacttaaatctaagactggaaactataaaaattctggaagataacattggaaaaacccttctagacattggcttaggcaaggatttcatgaccaagagcccaaaggcaaatgcaataaaaacaaagataaatttctgggacttaattagactaaagagctaagtaacagtcagtagagtaaacagacaacctacagagtgggaaaaaatcttcacaatgtaaacatctgacaaaggactaatacccagaatttaaaatgaatttcaacaaatcaacaagaagaaaacaaataatcccatcaaaaagtgggcttaggacatgaatagacatgtctcaaaagaaggtatacgaatgaccagcaaacatatgaaaaaatgctcaacgtcactaatgatcagggagatgcaaatcaaaaccacattgtgataccaccttaaactcctgcaagaatggccataatcaaaaaatcaaaaaaaacagtagatgttggcatggatgcagtgatcagggaaccctcctacacagctggtgggaatgtaaactagtacaaccactatggaaaacagtgtggggagtactcaaggaactaaaagtagaactaccatctgatccagcaatcccactactgcgtatctacccagaggaaaagaagtcattctacaaaaaagatacttgcacatacatgtttatagcagcaaaatttgtcattgcaaaaacgtggacccaatccaaatgcccatcaatcagcgagtggataaagaaactgtggatatatattcaatggaatactactcagccataaaaaggaatgaattaatggcattcgcagcaacctggatggacttggaggctattattctaagtgaagtaactcaggaatggaaaaccaaacatcgtatgttctcactcataagtgggagctaaactatgaggatgcaaaggcataagaatgacacaataggctttggggattcagtgggggaagggtgggaaggggctgagggataaaagactacaaatagggtgcagtgtatactgctcaggtgatgggtgcaccaaaatctcacaaatcaccactaaaaacatgctcatgtaaccaggcaccacctgttccccaataacctatggaagaaaaaaaaagttttttaaaaaaagaggccggacgtggtggctcacgcctgtaatcccagcactttgggaggctgaggtgggcggatcacgaggtcaggagatcgagaccatcctggctaacacggtgaaaccccgtctctactaaaaatacaaaaaattagccgggcatggtggcaggcgtctgtagtcccagctactcgggaggctgaggcaggagaatggcgtgaaaccaggaggcagagcttgcagtgagccaagttcgtgccactgcactccagcctgggtgacagagcgagactccatctcaaaaaaaaaagaaaaactcaaacagtccatgcttggtggctcatgcttgtaatcccagcactttgggagaccaaggtgggaggattacttgaactcagaagttcaagaccagcctgggcaacatagcaaaactccatctctacaaagaaaaaaaagtaatggaaaaaagttcaaataaataataacaggccaggcatgctggcttacgcctgtaattccagcactttgggaggcccaggtgggaggatcacctaggttgggagttcaagaccagctggccaacatggcaaaaccctgtctctactaaaaatacagcaattatctgggcatggtagcttatgcctataatcactttgggaggctgaggtgggtggatcaccagaggtcaggggttcaagaccagcctgggcaacatggtgaaaccccgtctctactaaaaatacaaaaattagccaggtgtgatggcacacccttgtaatcccagctacttgagaggctgaggcaggagaatagcttgaacccaggaggcagaggctgcagtgagcggagatcacaccactggactaccgcctgggcaactgggcaacagagtgagagtctgtctcaaaaaaaaaaaaaaaaaaaaaaaaaggccaggcatttttacttacttacttacttacacctgtaatgccagcactgtgggaggccaaggtgagtggatcacttgaggtcaggagttcgagaccagcctgaccaacatggtgaaaccccgtctctactaatattacaaaaatcagccaggcatggtgttgtgcgcctgtaatcccagctattcgggaggctgaggcaggagaatcacttgcacctgggaggcggaggctgcagtaagccaagatcgcgccactgcaccccagcctgggtgacaagagcaaaactctgtctcaaaacaaagaaaaaagagaaggaaagaattagaaaatcaccatgttgcaaaagccagcaaaatcattgatgcagacagcgatcatctataggtgctaaaaaaagtagatgaggccgggtgcggtggctcatgcctgtaatcccagcactttgggaggccgaggcgggcagatcacctaagatcaggagttcgagaccagcctggctaacatggtgaaaccccatctctactaaaaatacaaaaattagccgggcgaggtggcgggcacttgtaatctcagctactcggtaggctgaggcatgagaatgacttgaacccgggaggcagaggttgcagtgagccgagattgcatcactgcactctagcctgaacaacagagccagactccatccaaaaaaaaaaaaaaaaaaaaaatttggccgggggtggtggctcatgcctgtaatcccagcactttgggaggctgaggtgagcagatcacctgaggtcaggagttggagactagcctgaccaccatgccgaaaccccgtctctactaaaaatacaaaataaataaataaataaataagctgggcgtggtggcagttgcctgtaatcccagctactcgagaggctgaggcaagagaattgcttaaacctgggagttggaggttgcagtgagcgagaccatgccattgcactccagcctggtcaacagagcgggactctgtctcaaaaaaaaaaaaaattaaaaaaagaaggaaaaagatcaataatccaaaagtatactaggcaagggaggttaccagagagtacagaggaaactaatggtccttaaacacatgggactttgccctgccttgcttgtggtcaggaaaatgcaaattttctctactctgagatactatttttcacatgtcatgttggcaagaaaccaaagttcgataacactctctgttggtaaggctgtaaggcagcagaacttttacccattgctagagagagtgtgaatcgctctaacacctgagggggaatatttgtcaatatgcgtaaaaattacaaatgcacacagtctttgagccagaaatcccgcttcggaaaatttatccacagagacacttgcatatgtgtaaaatgacgttctgtatggcgatgtcagcctaagaacaaacgagtggaaaaaatgtccatctctgagagtgaaattaaccataaagcattcacacagcagcatgctatgcagctgtgaaaaaataaaaataaaaaataacaagaatgtggccaggcacagtggctcacgcctgtaatcccagcactctgggaggccaaggcgggcctatcacttgaggtcaggagtttgagaccagcctggccaacatggtgaaatcccatctctactaaaaaataaaaaaattagctgggcatggtggcatgcacctgtagtcccagctacttgggaggctgaggcatgagaattccttttttttttttttttttgagacggagtctcactctgtcacccaggctggagtgcagtggcgcgatctcggctcacggcaagctccacctgccaggttcatgccattctcctgcctcagcctcccgagtagctgggactacaggcacctgccaccacgcccagctaattttttgtatttttagtagagatggggtttcaccgtgttagccaggatggtctcgatctcctgacctcgtgatctgcccgcctcggcctcccaaagtgctggggttacaggcgtgagccactgagcccggctgagaattccttgaacctgggagacagaggttgcaatgagccgagttggcgccactgcactccagcctgggcaagagcaagactccgtctcaataaaaattaaaataaaataaaataaagttttgttaagagatctccaacacttgttaagtcacgtgggagaagcaacattcagaagaatgtgtagaacatgctaccttttaatgaaattctgggccaagcatgctggctcatgcctataatcccagcactttgggaggccgaggtgggaggatcacttgagcccagaagttcgagaccagcctgggcaacataataagacctcgtttctagtgagactggacaggatcttgctctgtcacccaggctggagtgcagtggcacaatcatagctcactgcagccgccaactcctgggctcaagtgatcctcccacctcagcctcccaagtagatgggactacaagcacacgccaccaccctgggccaaattttaaaaattcttttggagaaatgaagtctcagccaggtgtggtggctcatgcctataatcccagcactttgggaggctaaggtgggtggatagaaaggtcaggagtttgagaccagcctggccaacatggtgaaaccccatctctactaaaaatacaaaaatttgctgggcctagtggtgcccacctgtaatcccagctacttgggaggctggggcaggaggatctcttgaacccgagaggcgagggttgcagtgagccgagatcataccagtgcactccagtctaggtgacagagcaagactccatctcggaaaaaaatttttaaaagtccgggtgcggtggctcaggcctgtaatcctagcactttgggaggccgaggtgagtggatagcctgaggtcaggagttcaagaccagcctggccaacatggtgaaatgccatctccactagaaatacaaaaattaggccaggcacggtggatcacgcctgtaatcccagcattctgggaggccgaggcgggtggataacgaggtcaggagatcgagaccatcccagccaacatggtgaaaccccgtctctactaaaatacaaaaaattagccaggtgcggtggcatgtgcctgtaatcccagctactcgggaggctgaggcaggggaatcccttgaacctgggaggcggaggttgcagtgagctgaggtcgcaccactgcattccagcctggcgacagagcgagactctgtttcaaaaaaaaaaaaaaaaaaaaaaaattacctgggtgtagtggcgggtgcctgtaatcccagctactcaggaggctgaggaaggagaatcactttaacccaggaggtggaggttgcagtgagccgagatggcgccactgcactccagactgtgcaatgggagggaaactccacctcaagaaaaaaaaaaaaattcacaggggtagaaagtagtatggtggttgccaggggtagaaggaggaaggacggagagagtgtttaatggggacagagttttggttggggaagacaaaatgttctggagatggatgattgcacaataatgtaaatatgggtaatgccactgaatcgtacacttaaaaatagttaaaacagccggacacagtgctcacgcctgtaatcccagcactttgggagcccgaggtggggagatcccctgaggtcaggattcaagaccagcctggccaacatggtgaaaccccgtctctactaaaaatacaaaacacattagctggatgtagtggcgcacgcctgtaattccagctactcgggaggctgagacaggagaatcgctggaacctgggaggtggagactgcagcgagtcaagatggcggcattgcactccagcctgcgcaacaagagcaaaactccatgccaaaagaaaaaaaaaatgttaaaacggtaaattttacatgtattttgccacattaacaaaaaatgtttaggccaggtgcagcagctcatgcctgggcaaaatattgaggccctgtctctaaaaaaaaaaagaaaaaaaaaaacaagaaaaagaaaaatattggccaagcatagtagtgagctgaggtgggaagatggcttgatcccaggggtttgagactgcagtgagctatgatcgtgccactgcactccagtctgagtgacagagccagagccagacaaagccaaagagggaaaaaaatgggtttaacatactggcggggcacaatggctcacacctataatcccagcactttgggaggatgaggcaggcaggttgcttgaactcaggagtttaagaccagcctgggcaacatggtgaaaccctgtttctgcaaaaaaaaaaaaaaaaaaaatttagctgggcgtggtgacatgtgcctgtggtctcagctactctgggaggctgaggcaggaggatcacttgagcccaggaggtcaaggctacagtgagctgggatggtgctactgcacttcagcctgggtgatagagtaagaccctgtctcaaaaaataaataaataaataaataaataaagcaagcctaggagtttgagacctgcctggggcacatactgagaccctgtctctacaaaaaatttaaaaatgagctgagagtggtatgcatctgtggtcccagctactcaggcggctaaggtgggaggataacttgagcccgggagatcgaggctgcagtgagccgtgatattgctgctgactctagcctgggcaacggagtgagaccctgtctcataaagaaaaaaaaaacctgtattcatatttgttttcatgtgtacaaagtaattctggaaagatactcaggaaattaagagctgtggttattcatgagagaaaggggaggaactgaaacttggaaggcagatgctgcttcataaaccttatatgctttgctttttgaagcatgtaaatgtattaactattcgaagataaattaaatagtttggagaagctgagggcagtgatacagacctctaatcccagctatttgggaggctgaggtgggacgatcactttaggaaagggaactaagaccagcctggcaacacagcgagactccagtctcttaaaaaaaaaaaaaaaaaaaaaaaaaatatatatatatatatatatatatatatatatatatatatatatatatatatatttattgtattgctgggcacagtggctcatgtctgtaacctcagcactttgggaggctgaggcaggtggatcacttgaggccaagagtttgagactaccctggccaacatggtgaaacaccatctctaataaaaatacaaaaattagccgggagtggtggcgggtgcctgtagtttcagctactcgggaggctgagacaggagaatcacttgaacccaggaggtggacattgcagtgcactgagatggtgccactgcactccagcctggatgacagagcaagactccatctcaatatatatataatatatatttatatataatatgttaatatattgtatacatacatatatgtatacaacatattaatttatattaaggtaatatattatattaattaattatattatactaattaaattatattaatataagatgtattaatttacatatatttctgtatacaatatattaatatattataaaaatgttacattatgtcctaggctatatttatatgtgctatatttatattatataaataatatatcataaaaatatgttacattatgctatgtatttattttatatagcataatgtaacatataatatataatgtatatattacatattatatattatatattttttgtatacttttttaacatgtccccagagataggaaatataaatctatattatacattatataacatatttatattacatattatatattatatatcataatacattataatatattaattataatataatatattaatatattataacatattctataaataaaatatttatatattatataaatatgttatataatatgttatatataaatgctatgatatattgtataacataaatataaaattatatctcatataatagattatacatgatatataatatacattatatatcatatacattatatatcatacatgatatataataattatatttaatatataatgtatatttttataataattacatataacacatatatttatatattttatatatatatatatatatacagtctgtatcttcaactgttttgtttttttaaaaggacactcataattggatttagggcccacccagataatccaggatgagcttatcttaatataatataatatataattttatattatatattatatattgtattataatataataaatatataaatattttattatatattttataatatatattatatatattatatatataaaataaatatatatattatacataaatataaatatatataatatattatataacctatttatattatatatataaatatataaatatatcatatatatttatgtagaatatatttatatattataatatactatattattataattataatatatttatatataaatatataaatgtatttctatataatatataagtatattatataatagaatatagtataatatataacatctataatatataagtatacttatataatatatattatacaatatataagtatattatatatgtttatataatatataaacatattatataatatgtttatatatgatatatgcatattatgtttattatgatatatgcatattatataatatgtttattatatgatatataaatatatttatatgttatagatgttatgtatattatagatatattataatttataaatgtatatcataataattttataaacttataaatatatattatatatataaagtttggaaatcagggctttatttagaattggcaaaattggcttgcatttttatagtgaacaaaatcatcatgacacccatattcctagcaggtgacatttcccgttctgactatattcatttcactgtagctgctgtaaccagtgtccacaaaccaggtggcttacaccaatgaacatttattcccttcctgttctggttgtcaggagtctgaaatgcaggcgtcgcagggccgcgccccctctgaggcctctaggggagggtccctccttgcctcttccagcttctggaggctccaggccttccttggcttcctcaatggcattaagccaatttctgcctctgtcttcatatgaactttcctcttttgtctgtgtcttcaactcttttgttttttaaaaggacactcataattggatttagggcccacgaagataatccaggttgagctcatcttaaggttctttttaatttttttttaatggagtctcactgtgttgctcagactggagtgcagtggcatgcgatctgggttcaatgcaacctccgactcccgggttcaagcgattctcctggatcagcctcctgagtagctcatattacaggtgcccgtcaccacacccagctaatttttgtattttcagtagagaccgggtttcaccatgttggccaggctggtctggaactcctgacctcaggtgatctgcctgcctcagcttcctgaagtcctgggattacaggcatgagccaccccccaaggccatctaaagattcttaattacatttgcaaaagctctttttctttttctttctttcttttttttttttgagacagggtctcactctgttgccgaggctggagtgcagtgacaccatcccagctcactacagtctcaaattcctgggctcaagcgatcctcccacctcagcctcctgtgtaggggactacaggaacacaccaccatacccagctaatttttgtatttgtagagacgggagtgtcactgtattgtccaagctggtgtggaactcctggcctctagcaatcctcctgccttggtcttccaagtagctgagaccacaggcatgcatgcctggctaatattttctattttttaaaggccagatcttgacattttgcccaggctggtcttaaactcttacgctcaagtgttcctccggcctcagcttcctaagtagctggaaatacaggcacacatcacctcacctggctaaggttttgttttgttttgttttaagataggatctctgtcacccaagctgggtgacacaatcatggctcactgcagccgtgaccttctgggctcaagcaatcctcctgcctcagcctcctgagtagctgagattacaggcacctgccaccgtgcctgactaatttttttattttttagtagagacagggtttcactgtgttggccaggctggtctcaaactcctgaccccaggtgatccgtcctccttggcctcccagtgtgctgggattacaggtgtgagccaccgcacttggtttcaaatacttttttctagtaagatcacatttatagatcccagggtttaggatgtggacatagatttctgcagatcaccatttacacaccacaccgacgagtgctgtgcagaatgcttaggactctatagaatttcaccaaagtccccaagaggctcatgaagcaggtatacttatcatctccatcttcacaatgaactcagagaggtatagggtcttgcccaaggatacacaggaacagagatttgaacctagctatgttgggcccaaaactctgattctatgtgagacacaaaagacgcttctgggctgggtgcagtgactcacgccagcactttgggaggctgaggtgggcagatcacttgagatcaagagtttgaggctagcctggccaacatggcaaaaccccgtctctactaaaaatacaaaaattaaccagacatggtggcgcacacctgcagtcctagctacttgggaggctgaggcacatgaatagcttgaaccctggagacagaggctgcgatgagccgagatcactccattgcactccagtctgagcgacagagtgagaccctgtgtcaaaaaaaaaaaaaaaagaaaagaaaaagaaaaaagaggcttctggtttgaggcccatcagttaagtcaggcaggcaggcagcagatatttcctgaatgcttgttcttccccaggccaggcactgggggcgcaggagaaaagggcaggagggtacctccctacaggaagttcctggagaagaggccgaggggaagagagtattattcaccagccctttagaaacagagcaatcagaggtgacctctgcctccggaaggttgcccttggcctgtgacatccacagcaggcaactggggccaggagtttgtgacagagaaaaggacaaagagatgaagttctaatccaaagggaacgtgtccagtagaaataacatttaaacagcacttacttcatgcaggagattgttgtaaaaatttgactcactcattaaatctttcccattttgcaagtgaggaaaccaaggcacagagagtttaagtgacttggccaaggtcacacagcaggaaagaggcagaggtggaatttgaagccaagcttgccccccttaccagagcccttgtttttgctgtgttttaaagtcgaggtgaaattgacattaacatagctgtgcctggtggctcatgcctgtagtcctagcactttgggaggccaaagggggaggatcacttgagctcaggagttccagatcagcctgggcaacatagttaggcctcatctctttaaaaaagaaagactggccgcagtggtttacatttgtaaaccacctgtttcccacctggctaatttttgtatttttgttagagactgggttttacactacggtggacaggctggtctcaaactcctgaactcaagtgatctgcccgccttggcctcccaaagtgctgggattacagacgtgagccaccgtacctggcctggttagttttattttatatggatgttatctctctctttttttttttttttttgagacagagtttcgctcttgttgcccaggctggagtgcaatggcgtgatctccgctcactgcatcctccgactcccaggttcaagagattctcctgcctcagcctcctgagtagctgggattacaggcatctgccaccatgcccagcaaatttttgtatttttagtagagacgggtttcaccgtgttggccaggctggtctcaaactcttgacctcaagtgatccgtcctcctcagcctcccaaagtgctgggattacaggcatgagccaccatgcccggcctcaattttttttttttttagacaaggtttggctccgttgtacaggctggagtgcagtgatgcaatctcagctcatggcagccttgaacgcttaggcaaaagtgatcttcccacctcagcctcctgagtagctgggatcacagatgtgtgccaccacacctggctaatttttacattatttgtagaggtggggtttcacctgttgcccaggctggtctggaactcttgggttcaagcaatcctcctgccttggctgcccaaagttccggaattacaggcgtgagccatcattcccagcctctcaatatatatatttttattttattatgatgatgatgattattttttgtgacaaagtctcactctgtcgcccacgctgatgcacagtggctcaatctcggctcactgcagactctgcctcctgggttcaagtgagtctcctgcctcagactcctgagtaactgggattacaggcatgtgccaccatgcccagctaatttttgtactattagtagagatggggtttgaccatgtcggccaggctggtctcgaactcctgacctcaagtgactcgcccgcctcagctgcccaaagttctaggattacaggcatgagccactgtgcctggccactgccactaattttacattatggtgagttgtatgattatttcaatatacaactacagtataataataatagaaataaagtgcacaataaatgtgatgcgcttggccaggcgcggtggctcatgcctgtagtcccagcactttgggaggccgaggtggacggatcatgaggtcaagagatcgggaccaacctggacaacatggtgaaacctcgtctctactaaaaatacaaaaattagctgggcgtggtggcatatgcctgtagtcccagctactcggaagctgaggcaggagaatcgcttgaacctgggaggcagaagttgcagtgagccaagattgcgccattgcactccagcctggtgacacagcaagactccatctcaaaaaaaaaaaaaaaaaaaaaaaaagtgatacgcttgaatcatcccgaaaccatccacttgacactccatccatggaaaaattgtcttccacgaaaccggtttctggcgtcaaaaacgttaggatctgctgcctcaggacacccttctgtgtctccgtttcctcatttgtaatatgagaattatcttagtcctgaattcataaccccatgctcttaaaagtgtggtttccgccgggcgcagtgtctcacgcctgtaatcccagcactttgggaggtcgaggcgggcggatcacgaggtcaggagatcgagaccatcctggctaacacagtgaaaccccgtctctactaaaaatacaaaaaattagccgggcgtggtggcgggcgcctgtagtcccagctactcgggaggctgaggcaggagaatggcgtgaacctgggaagtggggagcttgcagtgagccgagatcatgccactgcactccagcctgggcgacagtgcgagactccatctcaaaaaaaaaaaaaaaagaaagaaagaaactgtggtttctgggctgggcgtggtgctccaggctggagtgcaatgacacaatcttggctcactgcaacctctgcctcctgggttcaagcgattctcctgcctcagccttctcagtagctgggattacaggcacccgccaccatgcccggctaatttttatatttttaatagagacagggtttcatcatgttggccaggctggtctcaaactcctgacctcaggtgatccacccgcctcgacctcccaaagtgctgggattacaggtgtgaaccactgtgtccagccaatcccagcacttcgagagtctgacgcatttgggtcccttgagtccaagagtttgagaccagcccgggcaacattgtgaggtctcatctctacaaaaaatacaaaaattagctgagcatggtggtacacacctgtagtcccagctacttaggaggctgaggtgggaggatcatttgaacccgggaattcaaggctgcagtgagctatgttgccaccactacaatccagcctgggcaacatagccagaccctgtctctgaaaaaaagaaaaaaaaaaaagtctggtttctgaaccagcaggatcaatgtcacctgggaactggttggaaatgcagattcttagatatgttccatacctgttgagtcaggagctctgcaggtaggacacaaagatatgtgttttgtttgtttgtttttgagacagagtctcactctgttgcccaggctgaagtgcagtggcgccatctcagctcactgcaacctccacctcccaggttcaagcaattctcctgcctcagcctcccaaggagctggggctacagacatgagccaccacacccggctaattttttgtatttttagtagaggcggggtttcaccatgttggccaggctggtctcgaactccggacctcaggtaatcctcctgccatggcctcccaaagtgctgggattacaggcgtgagccaccgcgcctggcctgatttctgttttaacaagcctacccaaagattctgaagctcactcacatttgagaaccattaccctgggttgttgggagaatcaaatacattacagagatataaaatgctttgagcagctgagggctgtggctcatatctgtaatcccagcactttgggaggctgagacaggcggatcacctgaggccaggagttcgagaccagcctggccaacgtggtaaaaccccgtctctactgaaaatacaaaaattagccaggtgtggtggtgggcgcctgtaatcccaactacttgggaggctgaggcgggagaatttcttgaatctgggaggcggaggttgcagtgagccaagattgtgccattgggactgtacctctagcctgggtgacagagcgagactccatctaaacaaacaaacaaacaaataaacaataaaatgcttacagtagtgtgcctggcctcgtagcacatactgcactgggcgttcactgctattatgatcttcgaagaggtccaggaccctaacgttgtggggatctggttgtgtcaccttaccccgccttttgggattatgcgtttctggtctctgcaggttggagaccttctcgcctctctgtcaatgatgttgacaataagctgggccacatcaccctgtccctagcgaaaggttatcacttcgctggggacatgagaaaggtcgggttgggggggccgtgcctgtctcccctctgctggagaagataagggaggcactcagctttcttcaggcagagtgtgggggagccacgatgtataaatggggggccaagaggcagcagagacactggcccactctcacgttcaaagcatctccgtccagcatggccaggtacatgctgctgctgctcctggcggtatgggtgctgaccggggagctgtggccgggagctgaggcccgggcagcgccttacggggtcaggctttgcggccgagaattcatccgagcagtcatcttcacctgcgggggctcccggtggagacgatcagacatcctggcccacgaggctatgggtgaggctggggagagagtggatgtagaaggggaacaggtggctggatgggtcccaggagctaaggacagagataagaggaggttgctggaggaggagggtccctgtcctgccacattcagccagggacacctgcccagccttgaaacaagggctcaggagttagcagagctgcagagctgggatggggtgttgcaagccatccatgggggctggaagtctgaggacaggtgggggcggggagcgtgccatttgcaaagacaacaccgaagtgttttccaaccctttccagcaggtaatgtgaagggtgtggtatacacatagctgggtttgtcacctaatgcatgacctctccccagcaagttggtttttcttccgtctctgagtgtcttttttttggagatgtggtctcactccattgcccaggcttgaatgcagtggcccaatcactgctcattgcagcctcgacctcccaggctcaagtgattctcctgcctccgcctccagagtagttgagaccacaggcacctgacaccatgcctggctagttttaaattttttttttgtagaaacaggggtctcactatgttgcctaggctggtctcgaactcctgggctcaagtgatcctcccacctcggcctccctaagtgctgagattagagtctctgagtgtctttatcttcaaatgggagacacagttcctgaatcttgcaggattaagtggtatgattaaatcaaaacagattagggcagagtctcagcagggcagcggcacaatctgggatccatcaggagagtcagagggaacagaagacctagcttcatgaggggcagggacctggcaaatagatattcatgatggtgagaaggaggataggtatgagcgtggacatagaagacacaccacttggattcagatagtagctctacaatgtaatagttgtgtgttcatgtgctactattttttttttttttgagacagaatctcattctgttgcccaggctggagtgcagtggtgcaatcttggctcactgtaacctccatcacctgggttcaagcgattctcgtgcctccagcctcccaagtagctgggattacagatgtgtgccaccatacctcgctaatctttttatttttagtagagacagtttcaccatgttggccaggctggtctccaactcctgacctcaggtgatcctcccacctcagcctcccaaagtgctgggattacaggcatgagccaccgcgcccagccatgcaaattctttactgagtcctgcctcagtggtctcctctggaaaatacgggtgataactgcacccacctcaactggttatcactgagaagaataaagaagttaacctgctaaagcacttaaaacgttgtttgacacaaagtaagtgatcaataaattattattattattattattattattattattatttttgagacagggtcttgctctgttgcccagactggagtgcagtggtgtgatcacagctcactgcagcttcaacctcttgggctcaagcaattctcctgcctcagcctcctgagtagctgggactacaggcttgtgccaacatgtctaactttttattatttgtagagacagggtagtgctgtgttgtccaggctgttcttgaactcctggttctggtgatcctccagcatgtgcccctggaagtgctgggattacaggtgtgagacaccgtgcccggactcaatagtcatttttgagtgctcatcatgttccagacattgttctaagtttttttttttaatgaatattaactccttataaaacttgagaaggttggagtaattatttttttccactttgcagaaaagaacattgaggctccaagaagtaaatttacttgctcacgattagagaagctggattcatgctcagtcagcccagctcccaaatgtaccaggtcctcaattaataaagagtaaggagaaataaatgacagggctgggtgcggtggctcacgcctgtaatcccagcactttgggtggctgaggtgggcacatcacttgaggtcaggagtttgcgaccagcctgaacaacatggtgaaccccatctctataacaatacaaaaatcagccaggcctgctggcagacacctgtaatcccacctactctggcagagccagaatttgaacccaggactgggtggaataaaaactctgaactatgtctatgactgttgtcacaagatcagagctagactggccaggagccatgactgtgggtgcagcagcagctgagccctgatcactaactctgttcatcttttgcaggagataccttcccggatgcagatgctgatgaagacagtctggcaggcgagctggatgaggccatggggtccagcgagtggctggccctgaccaagtcaccccaggccttttacagggggcgacccagctggcaaggaacccctggggttcttcggggcagccgagatgtcctggctggcctttccagcagctgctgcaagtgggggtgtagcaaaagtgaaatcagtagcctttgctagtttgagggctgggcagccgtgggcaccaggaccaatgccccagtcctgccatccactcaactagtgtctggctgggcacctgtctttcgagcctcacacattcattcattcatctacaagtcacagaggcactgtgggctcaggcacagtctcccgacaccacctatccaaccctgccctttgaccagcctatcatgaccctggcccctaaggaagctgtgcccctgcctggtcaagtggggacccccccatcctgacccctgacctctccccagccctaaccatgcgtttgcctggcctacacactccactgccacaactgggtccctactctacctaggctggccacacagagacccctgcccccttcccagtccaaactgtggccattgtcccctgaccagctaaaatcaagcctctgtctcagtccagcctttgcacgcacgcttcctttgccctgctttccatcccctctccctccaactcccctgccagagttccaaggctgtggaccccagagaaggtggcaggtggcccccctaggagagctctgggcacattcgaatcttcccaaactccaataataaaaattcgaagactttggcagagagtgtgtgtgtgtgtgtatggttgttgggcgtaggacaggtttcggggatgcgcggtacgcggtaccacccctcggaggcccccacccccagacgcccaggccgcctccccactccccctcaagcagccccagccggggactttccgtcgcggggaaggggcggggaccctgagcgaaaggtgcggaggcggcctgccggggtggttcggcttcccgttgccgcctcgggcgctgtacccagagctcgaagaggagcagcgcggccgcgcggacccggcaaggctgggccggactcggggctcccgagggacgccatgcggggaggcaggggcgcccctttctggctgtggccgctgcccaagctggcgctgctgcctctgttgtgggtgcttttccagcggacgcgtccccagggtgagtgctggagggagctcgtgtcccgggcgctgccgctgcgctccccgcgaaggcgccagtgctccaggataagccacgcgtatgcagagcgaacggtagaggtgcaggcgccactcggctcctcccggggcagggacccggcgacactggggaatgggcggcagcgaggtcgaaccggagccccggggcggggtgggggagctctctgggtggttaacaggatgtggcgagcacagggaaagggggggtttgcacggagcccgggcaggggtgcctagcgcctcccttcctgctgctcatttccctaagcccccccaccttgcaattgtcagaagtccaagttctggggtgtgcaggcggaagggggggattcgaccccctttcctgagaccctctgactccctctccaggcagcgccgggccactgcagtgctacggagttggacccttgggcgacttgaactgctcgtgggagcctcttggggacctgggagccccctccgagttacacctccagagccaaaagtagtgagtacagggaggtgacgtggggaaacaggctttggaggtggccgctcaggccccaggctgctttggttgaaaggttccaggagtcaagcctggccaacatggtgaaaccctgtctatactaaaaatacaaaaaaaaaaaaaaaaaaaaaattacccaggggtggtggcgcgcgcctgtagtccctgatactcaggaggctgagacaggagaatcgcttgaacccgggaggcggaggttgcagtaagcccagatctcgccactgcactccagcctgggggacagagggagactctgtctcaaaaaaaaaaaaaaaaaaaaagaaaagaaaagaaaagaaagtcccaggagtctgcccccctcccccaatactcctccactccttcaattctagcttccctcgtttctttgctgtgtcaccctgggcaagtcactttccctctttgagtctccttttcatttctctattaaatagcaatcatagggccaggagaggtggtttgcacctgtcatcccagcattttgggaggccgaggcgggaggatcgcttgagcccaggaggagttcagagttttagagagcccgtcacttttttttttttttttttttgaaacggagtttcactcttgttgcccaggctggaatgcaatggtgtggtctcggctcactgcaacctccacctcctgggttcaagcgattctcctgcctcagcctccagagtagctgggattacaggcatgtgccaccatgcctggctaatttttgtatttttagtagaggggggaggtttcaccatgttggccaggctggtcttgaactcctgacctcaggtgatccacccgcctcagcctcccaaagttctgggattacaggtgtgagccaccgtgcctggccgagagcccgtctcttaaaaatataaaatataatataaataaagggaaataggccaggcgcagtggttcacacctataatcccagcactttgagaggccgaggtgggcagattacttgaggtcaggagttcaagaccagctgtagtaattccagctactcgggaggctgaggtgggaggatcacttgaacccaggaggcagaggttgcggtgagctaagatcgtgccattgcactccagcctgggtgacagagtgagactctgtctcaaaaaaattttaaaaaataaaagctggcgtggtggctcacgcctataatctcagcactttgggaggccgaggcgggcagatcacgaggtcaggagttcgagaccagcctgaccaacatggtgaaaccctgtctccactaaaaatacaaagattagccgatgtggtggtgcatgcctgtaatcccagttactcaggaggctgaggcaggagaattgcttgaacccaggaagtggaggttgcagtgagctgagatcgcaccactgcactccagcctggccgacagagcgagactccatctcaaaaacactaaaaataaaaaataaaaaagggaaataataacagaacctgcctccgaaggttaagtctgaggattcaaagagttaggtgcttggcaaggagaaagttgcttcataatgtgaacctggtttttattgctgtgtgacattaggcaagtcacttaacctctctgagcatgttaaaagattattcagtgtggtgctggggatgctgcagtgaaagaggtagacagaaagccctgcccacagtccaaggactccatgtgtttcttcatgatgaatcatacctggaaactcataatttcaaattgggctaagtgagggaagaggaaaagagtcaatgaaagataagaatgggagacagaggtcctggatttttttttctttttaatattaatggttaaaatacacacaacaggccctacacggtggctcacgcctgtaatcccagcactttgggaggccgagacaggcagatcacctgaggtcaggagttgcagaccagcctggccaacatggtgaaactccgtctctactaaaaatacaaaaattagccaggcgtggtggcacatgcctgtagccccagctatttgggagtctgaggcaggagaatcgctggaactcgggaggcagaggttggagtgagccaagatcgcgccactgtactccagcctgggtgacagagcaagactctgtctaaaaaaaaaaaaaggccgggcgcggtggctcaagcctgtaatcctagcactttgggaggccgaggcggtggatcatgaggtcaggagatcgagaccatcctggctaacacggtgaaaccccgtctctactaaaaatacaaaaaaattagctgggcgtggtggctggcgcctgtagtcccagctactcaggaggctgaggcaggagagtggcgtgaacccaggaggcagagcttgcaatgagccgagatcgcgccactgcactccagcctgggcaacagagcgagactccgtctcaaaaaaaaaaaaaattcatacaacataaaacttaacgatatttttaaaaatttgttttgggaacagggtcttactcctgttgcccaggctggagtgcagtggggcagtcagttcactgcagcgacttctcaggctcaggtgatcctcccacctcagcctcccaagtagctgggactacaggcatgcaacaccatgcccagctaattttttaaatatatatttttagtagacacagggttttaccatgttgcccagactgctttcgaactactggcctcaagagatccacctcctttgtcctcccaaagtgctgggactacaggcgtgagtcactgtgcctggccaaaatctacgatcttaaccatttttaagtgtccagttcagtggcattaagtacattcccatggtgctatcccggttaccattcacctccagaagggggcctagtttttttttatttgagatggagtttcgctcttgttgcccaggctggagtgcaatggcgcgatctcggctcactgcaacctccgcctcccgggttccagcaattctcctgcctcagcctccagagtagttgggattacaggcacacgccaccacgcatggctaattttgtatttttagtagagatggggtttctccatgttggtctggctggtctcgaactcccgacctcaggtgatccacccacctgggcctcccaaagtgctgggattacaggcagaagccactgagcctggcggggggcctagttttaattggtacagggagggggagtcagagaagccacatcttttctatttttattttagttttattgatttatgtattgattttatttattttgagaagaggtcttgctctgtcacccaggctagagtgcagcggtgcgatcatagctcactgcaacctcaaactcctgggctccagccattttccctcctcggccttcccagtagttggaattacaggaatgtgtcaccatgaccagctaatttttaaaaattttttgtagtggtagctcacgtctgtaatcccagcactttgggaggccgaggcagaaggatggcttgagcccaggggttggagaccagcctgggcaacgtagtgagacccgtctctattaaaaaaaaaaaaaagaaagaagaagaagaagaagaagaggaagaggagggaaaaaagtaagaataattttaaaagtaaataaataaataatttttttggtagagacagagtcttgctctgttgcctagggtagtctcaaactcctgagctcaagcgatcctcccatcttgccctcccaaaataatggaattacaggtgctactatgcccagcctgagattttgtactctttggccatcatcttctccccctagcctctgtagtcaccagtttactctgcctctaggaggagttcagatgttttagattccacgtatcaatgaaaacatgtggtgtttgtctttccgtgtcttatttcacgtaacataatgttcgccatttccatccacattgttacaaatgacaggatttcctttttttttttttttttgagacagaatctggctctgtcacccaggctggagtgcagtggcgcgatctcagctcactgcaacctctgcctccccggtccaagcgattctcgtgcctcagcctcccgagtagctgagattataggtgcgcatctccacatctggctaatttttgtatttttagtagagccgagtttcaccatgtcagccaggctgatctcaaactcttgatctcaagtaatccacccacctcggcctcccaaagtgctgggattacaggcgtgagccaccacgcacagtgtattttcttcttttttaaggttgaatagtattccatcgtgtatgtataccacatttttttttttttgagacaaagtctcgctctgtcgctcaggctggagtgcaatggcgtgatctcagctcactgcaacctctgcctccagggttcaagcgattctcctgctttagcctcctgagtagctgggatgacaggcatgcgccatcacacctggctaatttttgtatttttaatagagacggggtttcgccatgtttgtcaggctggtctcgaactcctgacccgaactctgcctgccttggcctcccaaagtgctgggattacaggcatgagccaccgtgcccggccccacatattcttgatccatacatctggtgatggacacattccatatattggctgttgtgaatagtgctgcattgggaagacacgtccgttggacaaactgatttcatttccttatttatatatttatttttactttttttttttttgagacagagtctcactctgttgcccaggctggagggcaatggagcaatctcagctcaatgcaacctccatctttcgggttcaagtgattctcctgcctcccaagtagctgggactacaagcgtctgccaggacacacggctaatttttgtatttttagtagagatggggtttcacgatgttgtccaggctggtctccaactcctggcttcaagtgatccgcctgcctcggcctcccaaagtgctgggattacaggcgtgagccaccacgcctggccccttcttactatttgttaaacacaccaggcacagtttggcctccaggtctttgcaccctgtgtttcctcttcctggaatgctgttcttctagctactgcatggttctgtcctcatctccttcaggcctttattcaaatgtctcctcaggctgggcgtgatgtccctgcacctgtaatcccaacactgggaggccaagggggatggtgcgggggattgcttgaggccaggagttcgagaccagtctggccaacagagtgagaccctctcgctctctctctctttttttttttttttgaaatggagtcttgctctgttgccaggctggagtgcagtggtgcgatctcggctcactgcaacctccaactccctggttcaagcgattctcctgcctcagccttccgagtagctgggattacaggcacgtgccaccacgtccagctaatttttgtatttttagtagagacgggggtttcaccgtgttggccaggatggtctcgatctcttgacttcgtgatccacctgcctcgggctcccaaagtgctaggattacaggcgtgagccactgcacctggcctgtctctctctttctatatatggtgcttttgttgctgtttttgagacagggtcttatcctgtcacccaggctggagtgcagtggcatgactgcaactcaacctcctgggctcaatcgatcctcccaccccagcctctcaagtagttggaaccacaagtgcgcgccactacccctggctaatttttaaaacattttttgtagacatgggggtctcagtatgtgactgcttgaggccaagagttagaggagaccagcctgggcaacatagcaagaccccatttctacaaaaaatttaaaaattagctgaacattgtgatgcacacctgttatcccagctactctggaggctgaggcaggaggattgcttgagcctaggagttcaaggttgcagtgatctatgatcgcactgctccagttacagagtgaggtcgtgtctctaaaaaaaaaaaaaaaaaaaaagagagagaggaaagggccgggcgcagtggctcacgcctgtaattccagtactttgggaggccgagacaggcggatcacctgaggtcgggagttcgagaccagcctgaccaacatggagaaaccctgtctctactaaaagtacaaaactagccgggagtggtggcgcatgcctgtaattccagccactagggaggctgaggcaggagaatcgcttgaacctgggaggcagaggttgcggtgagccaagatcgcaccattgcactccaagctgggcaacaagaacaaaaatctgtctcaaaagaaaaaaaaaagagagagagaaagcaaggaaggaagggagggagggaggaaagaagggagagggagaggaagggaaggaaagaaagaaaaagagagagagaaaagagcagttatgaccaggtatggtggctcatgcctgtaatcttagcaatttgggaggccgaggtgtgtgcatcacttgaggtcaggagttcgagaccagcctagccaacatggtgaaaccccatcgctactaaaaacacaaaaaaattggccaggtgtggtggcacacgcctataattctagctacttgggaggatgaggtgggaggatcacttgaacccaggaggcagaggttgcagtaagccaagatcacgacattatactccaacctaggtgactgtcttaaaaaaaaaaaagaaaaagagcagttacttttattaccctcattttgtagatgaggaaactgatgcacagagaagttaagtcacttactcaaggtcacacagctctgaagcagcagaggtgggatttgaacccaagcagagcaggctgcagccactctgttggcacaagggtggttatcagtggccctggctctagccgagtgtgcatctcatccccgcctctctcctcacagccgttccaacaaaacccagactgtggcagtggcagccggacggagctgggtggccattcctcgggaacagctcaccatgtctgacaaactccttgtctggggcactaaggcaggccagcctctctggccccccgtcttcgtgaacctagaaacccaaagtaacgtggcaggagggtgggcgctctatgcggggtgggtgctcttggagggcgtggctcactacaccctagtttccccttccccagtgaagccaaacgccccccggctgggccctgacgtggacttttccgaggatgaccccctggaggccactgtccattgggccccacctacatggccatctcataaagttctgatctgccagttccactaccgaagatgtcaggaggcggcctggaccctggtgagtgctggggtccttttctccccaccctattccgggcggggactgaggcaacatctcctaatctgagacccagcccaggactcattctgtgcctgcccctgagcctgtatgcctcccactcaaaatgcctgcatgtgcctcttgttcagctacaaattctcctcccatggctgggcacggtggttcacgcctgtaatcccagcactttgggaggctgagggggatggatcacttgaggtcaagagttcgagaccagcctggccaacatggtgaaatcccatctccactaaaaatacaaaaattacctaggcatggtggtgggcgcctgtaatcccagctactgaaagctgaagcaggggaatcactggaacccgagaggcagaggttgcagtgagctgagattgggccactgtgctccagcctgagctacagagtgagactcagtctcaaaaaaaaaaaattttttttctcctgccaaaataatctatcacccggtcacagtggctcatttctaaaatcccagcaccttgggaggctgaggcaggaagattgtttgaggtcaagagtttgagaccagcctgggcaggatagcaagactcgtctctaagaagttaaaaaataatctgaccaggtgcggtggctcacacctgtaatcccagcactgtgggaggccaaggagagtggatcacctgaggtcaggagttcgggaccagcctggccaacatggtgaaaccccatctctactaaaaatacaaaaaagtagctgggcgtgctggtgggtgcctgtagtcccagctaattgagaggctaaggcaggagagaatcacttgaacccaggaggtggaggttgcagtgagctgagatcgtgccactgcactccacactccagcctggcaacagagcaagactccgtctcaaaaaaaaaaagaagaagaagagttcagaattgtgattattcatgcaattcagagcaacactgagatgcagaatttttttttttttttttgagatggcgttttgctcttaattgcccaggctggagtgcaatggcatgatctcggctcactgtaacctccaccatctaggttcaagcgattctcctgcctcagcctcccgagtagctgggattacaggcatgtgccatcatgcccggctcattttgtattttcagtagagacggggtttctccatgttggtcaggctggtcttgaactcctgacctcaggtgatccacccacctgggcctcccaaagtgctgggattacaggcatgagccactgcacccggcccccttttttttttgagacggagtctcactgtgttgcccaggctggagtgcagtggtgccatctcaactcactgcaacctccacctctcaggttcaagtgattcccccacctcagcccctcaagtaggtgggattacaggcatgtgccaccatgcccagctaagtttttgtattttttttaatagagatggggtttcgctatttggccaggctggtctcgaactcctgacctcaggtgatccacccacctccacctcctaaagtgttgggattacaggcgtgagccacctcacccggctgagatgcagactttggaatctgactacctcagtgctcagctccagcacaccagctctgtgaccttgggctagtcactttccctctctgggcctcagttccctcgtctgtaaaacgagataataatagaagttaccacttcctgctatacctagcacatagagtgaccaccttttctctgtctgctcgggactgtggcaatttttttgacaggcccatgttctggaaacccccttggtcctgggcaaatacaaatggttgctcactctgctgatagataagttcaagtaccagctaggcgcagtagctctaatcccagcactttgggaggccgaggtgggcagatcacctaaggtcaggagttcaagaccagcctggccaagatggtgaaaccccgtctctactaaaaatacaaaaattggctgggcttggtggctcacacctgtaatcccagcactgtgggaggccgaggcgggcggatcacgaggtcaggagatcgagaccatcttggccaacatggtgaaactctgtctctactaaaatacaaaaaattagctgggcatggtggcgcgtgcctgtaatcccagctacttgggaggctgaggcaggggaatcgcttgaacccaggaggcagaggttgaagtgagctgagatcgtgccactgcactccagcctggcgacagagcaagactctgcctcaaaaaaaaaaaaaaaaaaattaaccaggtgtggtggtgggtgcctgtaatcccagctactcaggaggctgaggcaggagaattgcttgaacccaggagggagaggttgcagtgagccaagatcacaccactgcactctagcctgggccacaacgagactgtctcaaaacgaaaaacaaaggaaaaaaaaaaagataagttcaaatacccttgactcaggccctgggcccatcacgctcgcctgtctctcccccagctggaaccggagctgaagaccatacccctgacccctgttgagatccaagatttggagctagccactggctacaaagtgtatggccgctgccggatggagaaagaagaggatttgtggggcgagtggagccccattttgtccttccagacaccgccttctggtgaggatatctgggcttgccctcaatccacgcccctcccacccccagaagtctgtccaatcatgtcccactcatttgttccccgtttcctcatccttgccagctccaaaagatgtgtgggtatcagggaacctctgtgggacgcctggaggagaggaacctttgcttctatggaaggtgagcttcaggcaccagttacatttctctgcacgtgttaggaaacccctaaataacaatgacataaggccggatgcagtggctcacgcttgtaatcccaacactgctgtgggaggccgaggagggtggatcacttgaggtcagcagttggagaccagcctggccaacatggtgaaaccccatctctactaaaaatacaaaacttcacggggagtggtcgtgggcgcctgtaatcccagctactctggaggctgaggcagaagaatcacttgaacccaggaggtgaaggttgcagtgagccgagatcacaccactgcactccagcctgggcaacaagagtgaaactccgtctccaaaacaaaaaacaaacaaaacccaatgacataaacaagacagagtttaccatgctgcccccttgaggttgcttcgaagattcaaggatgggttgctaaagtggtcagcacagggtggggcatggagcaagtctccaccaatgtcagctgcttccgagaggtctgagccataaggatgggtgcagatattccgggcaggggcagcagatgcaaaaacctgacagcgagactggagctcagctccagaaaatataacacagtgtgctaagagtttatttattcatttatttattttgagatggagtctcgctctgttgcccaggctggagtgcagcagcgtcatctcatctcagctcactgcaacctccacctcccaggttcaagccattctctgcctcagcctcccaagtagctgggattacaggtgcccccccaccacgcccggctaatttttgtatttttagtagagatgggggtttcaccatcttggccaggggggccttgaactcctgacctcatgatccagccacctcggcctcccaaagtgctggaattacaggcgggagccaccgcgcctggcctgtgctaagagtttaaatgctagtatcaaaagggtattaataggctgggcatggtggctcatgcctgtaatcccagcactttgagaggctcaggtgggcagatcacttgaggtcaggagttcgagaccagcctggccaacatggtgaaaccccatctctactaaaaatacaaaaattagctgggcctggtggcaggcacctgtaatcccagctacttaggaggctgagacaggagaatcgcttgaacctgggaggtggaggttgcagtgagctgagctcgagccactgcactccagtctgggcaacaagagcaagactctgtctcacaaaaaaaaaaaaaaaaaaggtattataaaatggctgacaaggtgcaattatcctcactgattcaaatctgtgaagcacctgctatgtgccaggtggcattgcttgacccttgctctcagtaaataagcaaaggaacacgatgacaggtgtggttttccaccttcttagaccacacaatccagtatcttttatttatttatgtatttgagatggagtgtcactcttgttgcccaggctggagtgcaatggggcgatcttggctcaccgcaacctccgcctcctgggttcaagcgattctcctgcctcagcctcctgagtagctgtgattataggcgcccgccaccacacccggctaatttttgtatttttagtagagacgaggtttcaccatgttggccaggctggtctcgaactcctgaaatcaggtgatctgcccactcggcctcccaaagtgctgggattacaggtgtgagccaccgtgcctggccgatattttaaaaaattaaatcagcaaactagagttcaaggaccaactgcctgttttcagaaatacagtttgattggaaccaagaccagggttagggaggtgagcagggtagggtcacacaggtgcaggatcaaatcctgtttttactttaaaatcttgatattttggaccgagtgggtggctcatacctgtaatcccagcactttgagagtctgaggcaggaggaccacttgaggccaggagttcgagaccagcctgggcaacatagcaagctacccatctatacagagaataaaacattaccaggggccgggcacagtggctcagcctgtaatcccaacactttgggaggccgaggcgggtggatcataaggtcaggagttcaagaccagcctggccaagatggtgaaacccccatctctactaaaaatacacaaattagccgggcgtggtggcaggcacctgtaatcccagctacttaggaggctgaggcaggagaatctcctgaacccggggaggttgcagtgagctcagattgcgccactgcactccagcctgggtgacagaatgagactctgtctccaaaaaaaaaaaaaaaaattagcggggtgtggtggcatgcgtctatagtcccagctactggggaggctgaggtgggaggatcacttcagcctaggatgttgaggctgcagtgagctatgattgcaccaccgcacttcagcctgtacaatagtgagaacttatgtcaaaaagaaaaaaaaaaaaaagatggctgggcgtggtggctcacgcctgtaatcccagcactttgggaggccgagacgggcggattttttttttaagagacaaggtcaggagatcaagaccatcctggctaacatgtgaaaccccgtctctactaaaaatacaaaaaattagccggacgtggtggcaggcgcctgtagtcccaggtactggggaggctgaggcaggcgaatggcgtgaacccgggaggcagagcttgcagtgagccgagatggcgccactgcactccagcctgggcgacagagcgagactctgtctcaaaaaaaaaaaaaaagttgatattttgtttgtcatgggtttttaggcattaattttcatttattacaatactgcattaaaatattatttatctcacttattgggtttttggtatcccccactcccttttaaattttgcacctggccaggtttgctgactcacgcctgtaatcctagcactttgggaggctgaggcaggcagatcacttgaggtcaggagtttgagaccagcctggccaacatggtgaaaccccgtctctactaaaaatacaaaaattagccgggcgtgatggcaggcgcctgtaatcccagctactcaggaggctgaggcaggaacatcgcttgaacccgggaggtgaaggttgcagtgagccgagatcacgccacttcactccagtctgggtaacagaatgaagactccgtctcaaaaaacaaacaaacaaacaaacaaaaaatgcttcactgaccggtggtttatcaggtgacctcagggagacacatatatgtgcgtgattaatgggagacattaacccctttttcccttcatctctcaggccccagggccctgtgtgcaggtgagctacaaagtctggttctgggttggaggtcgtgagctgagtccagaaggaattacctgctgctgctccctaattcccagtggggcggagtgggccagggtgtccgctgtcaacgccacaagctgggagcctctcaccaacctctctttggtctgcttgggtaagagactgtgaccttcctcagctcggtgccctggaggggtgggaagtgacttcctgagtgggcagctgagacttctctccaccctccagattcagcctctgccccccgtagcgtggcagtcagcagcatcgctgggagcacggagctactggtgacctggcaaccggggcctggggaaccactggagcatgtagtggactgggctcgagatggggaccccctggagaaactcaactgggtccggcttccccctgggaacctcagtgctctgttaccaggtgaggccctgggacacctgggtctccatccccgctgttagagcagacggatgggtggacttgtaagagggagtgctatgattaaagtagcgtgatggccgggcttggtggctcatgcctgtaatctcagcactttgggaggccgaaaggggcggatcacctgaggtcaggagttggacaccagcctggccaacatagtgaaaccccgtctctactaaaaatacaaaaattagtggggcgtggtggcacatgcctgtagtcccagctactcgggaggctgaggcaggagaatcgcttgaacctgggaggtggaggttgcagtgagccgagattgcgccactgcactctagcctgggtgacagagtgagactcagtctcaaaaaataaataaataaataaataaatagcgtgaattcacacaagacttttttttttgctttttggaggcaagatcccactctgtggcccaggctagagtgcaatggtgccatctcagctcactgcaacttccatctcctgggttcaagtgattctcgtgactcagcttcccgagtagctgggactatgggagcgtaccaccacaatcggttaattttttttttttttttttaagtagagacggggtttcaccatgttggtttggctggtctccaactcctgacctcaagtgatctgcctgccttggcctcccaaagtgctgggattacaggcatgagccactatgcccagcctaacttttcttttttttttttttgagatggaggctggctctgtcacccaggctggagtgcaatggtgtgatctcagctcactgcagccttcacctcccgggttcaagcgattctcgtgcctcagcctctggggagtgactgggatcacaggcccccaccgccatgcccagctaatttttttatttttagtagagacggggtttcaccatgttggctaggctggtgtcaaactcctgacctcaagagatccacccgcattggcctcccaaaatgatgggatgacaggggtgagccaccatgcctggccctttttttttttttttttttggagtcttgctctgtcgcccaggctggagtgcagtggtgcgatatcggctcactgcaagctccacctcctgggttcacgccattctcctgcctcagcctcccgagcaactgggagtacaggcgcccgccaccacgcccggctaatttttttttttttttgtatttttagtaggaacggagtttcaccatattagccaggatggtctcgatctcttgacctcgtgatctgccctcctcagcctcccaaagtgctgggatttcaggcatgagccaccgcacccggcatttttttttttttaagagatgagtctcactctgtcagccaggctggagtgcagtggcgtgatctcagctcactgcagcgtcgacctccatggctcaagcaatcctcccacctcagcgccctgaggagctggtattacaggcatgcgccaccaagcccagccagtttttgtattttttgtagaggtggggtttctccatgttgcccaggctgttcttgaactcctgagctcaggcaatccacctgccttggcctcccaaagtgctgggatgacaggcatgagccacggtacctggcaagaaatctttataaataaataaataaataaataaattaattaattaatgaacttggaagaactgtgaagatgttgggtaagaaatttaggacacagtcccaagacccacaaggatatatgaaccaaagaagcgaaggcccaattatggaaaattcccagttggggaaggctatgtggatgtgatagggtttaggggagagagtgcagcaccctcagctaccatggtaggtgctgtcagttgcctgctcatatctgtttgaccacctcagaggttttaggcctctctcccagctgcccacacttgtttcctggcctaagggctttttctggtcactgaggcattttgcctgcctgagaagcaagatggaaatattgagaagagccctcaggaacagccctcagcatgactaatgaggcttggtggataaataccccagctccgtccccctgagctgggctgactctgcgatgcctgctctctgctggcccctagaggtcccccatgggactgcgtctcagttgtccacagtgagaacctgttccttccccatttcactcccctactgccctattggggttttctgggattacctcctagataaatgacttacagtcagatccttatctcagggtgtccttctggggaccccagtgaagacacctaggaaatgagcatgggaaggagagccaactctaactggtctttatttctttgtcactcagggaatttcactgtcggggtcccctatcgaatcactgtgaccgcagtctctgcttcaggcttggcctctgcatcctccgtctgggggttcagggaggaattaggtaagagtggggctggaggatgggggggcttctgtaacccaggccgaccttgacctactgccttcctccccagcacccctagtggggccaacgctttggcgactccaagatgcccctccagggacccccgccatagcgtggggagaggtcccaaggcaccagcttcgaggccacctcacccactacaccttgtgtgcacagagtggaaccagcccctccgtctgcatgaatggtgagcttccctgcctgctgacctgtcctcccagcccccacaagacccacccatcagtcagccccaccccttgtccccacgtgggcctctttggcccagggaccatacatggtgtcctcaattccctcttggctatcaatgtaacgagctttcattcggccattaaaaatgaggatgccaatctatatttattgacattgaaagatgcttgtcatattttattagtgaaaaagataaaaggatgttaaaattccgtggtatggttccattttttttttttttttttgagacagagtctcgctttgtcaccaggctggagtgcaatggcacgatctcagctcactgcaacctccgcctcccaggttcaagcaattctcctgcctcagcctcctgagtagctgggattacaggcgcatgccaccatgcccggctaatttttgtatttttagtagagacagtttcaccatgttggtcagactgatctcgaactcctgacctcgtgatccacccacctcagcctcccaaagtgcggggattataggtgtgagccactgcgcccggcctatatataattttaaaaatatatatagaaggcccggcatggtgggtcacgcctgtaatcccagcactttgggaggccaaggcaggcagatcacttgaggtcaggagttcgagaccagcctggccaacatggtgaaacctcatctctactaaaaatacaaaaattagccaggcatggtggcacagcctgtagtccagctactcagaaggtggctgaggcactagaattgcttgaatccgggaggtggaggttgcagtgagccaagatcatgcaaagacaaactaaataatatctaagcagtgtatgagatggtgataagtgctgagtagagaatgaagcaaggggctgggcaaggtggctcacacctataatcccagcacttttggaggccgaggtgggcagatcacctgaggtcaggagtttgagaccagtctgaccaatatggtgaaacccagtctctactaaaaatataaaaattagccagatgtggtggcgggcacctgtagtcccagctactcaggaggctaagacagcagaattgcttgaacccaggaggcagaggttgcagtgagctgagatcacatgactgcactccatcctgggcaacagagtgttacagagcgagacttcatgtcaaaaaaaaaaaaaaaaaaagagaatcaaacaaggaaggtgggtggtgaagggggtgcaatttcaaatagagcggggtcaaggaaagcctcacggaagaggtgacctttgagcaaagacctaaaagagatgaggagggagccatgtggatacctgggagagagtgttgcagacagcaggaagagcacatgcaaaggccctgtggtaggcttgaccacctccccaacttctttggttgtgttctccagtgagtggcaacacacagagtgtcaccctgcctgaccttccttggggtccctgtgagctgtgggtgacagcatctaccatcgctggacagggccctcctggtcccatcctccggcttcatctaccaggtaggggggttgggatgggattgccacagggaggggatgtactccacagtggggagaggtagcatctggagtcattacttggaagctaggtgcagtggctcacccctgtaatcctaacactctgggaggctgaggcaggtggatcacttgagcccaggagctcgagaccagcctgggcaacatagtgagacccccttctctacaaaaaataaaacaattagctggatgtggtagcatgcgcctgcggtcccagctcctggagaagctgaggctcgaggatcgcttgagcccaggagttggaggctgcagtacacggattacaccactgcgctccagcctgggcaacaaagcaagaccctgtctttaaaaaattaagaattgccaggcacagtggctcacgcctgtaatctcagcactttgggaggccgaggcgggtggatcagttgaggtcaggagttcgagaccagcctggccaatgtggtgaaaccccatctctactaaaaatacaaaaattagctgggcgtggtggcgtgcggctgtaatcccagctacttgggaggctgagagagaattgcttgaacccaggaggcggaggttgcagtgagctgaggtcgcaccactgcactccagcctgggtgacagggcaagactctgtctcaaaaataaaaataaaaaataaaataaaataaaaaattaagaatgatctcttccctaccctaccagataacaccctgaggtggaaagttctgccgggcatcctattcttgtggggcttgttcctgttggggtgtggcctgagcctggccacctctggaaggtgaggctgtcggatacatgcatctctacccacgtggggaaggcagctgggcattttgctgagcttccagggggcttgaagggaggcctcagggcgcagtcacattcatgaaccctgcaccctgggctggggcatctggccatctggatctgctgccctgactactcctgtcttgccaggtgctaccacctaaggcacaaagtgctgccccgctgggtctgggagaaagttcctgatcctgccaacagcagttcaggccagccccacatggaggtgagtcaaagggccggctagtcggagccctctgggggactggggagtcctggggcagtggggagggggtgaggtgtgggtcggggaggctggggcaggattacaggctcatctcttcccagcaagtacctgaggcccagccccttggggacttgcccatcctggaagtggaggagatggagcccccgccggttatggagtcctcccagcccgcccaggccaccgccccgcttgactctgggtatgagaagcacttcctgcccacacctgaggagctgggccttctggggccccccaggccacaggttctggcctgaaccacacgtctggctgggggctgccagccaggctagagggatgctcatgcaggttgcaccccagtcctggattagccctcttgatggatgaagacactgaggactcagagaggctgagtcacttacctgaggacacccagccaggcagagctgggattgaaggacccctatagagaagggcttggcccccatggggaagacacggatggaaggtggagcaaaggaaaatacatgaaattgagagtggcagctgcctgccaaaatctgttccgctgtaacagaactgaatttggaccccagcacagtggctcacgcctgtaatcccagcactttggcaggccaaggtggaaggatcacttagagctaggagtttgagaccagcctgggcaatatagcaagacccctcactacaaaaataaaacatcaaaaacaaaaacaattagctgggcatgatggcacacacctgtagtccgagccacttgggaggctgaggtgggaggatcggttgagcccaggagttcgaagctgcagggacctctgattgcaccactgcactccaggctgggtaacagaatgagaccttatctcaaaaataaacaaactaataaaaagcaaaaaaaaaaaaaaaagaaaagaaaaaacactgcatttgggcaccatctcagctcccttgcatccaggtgcagcatggactgagttcttgacaacagaatgtggtcagaagtgacatatgccaacacggggtctgggtgggggctcccccacatcctttccttgcctatgagctggaacataacacatgcctatgatccagctttggtcatacccaaggggaaggtggagcaagaaatgaaaaggaacctgaatccctgaatgactgcatggatagaaccactaagaaaaataaacttttatatttttatagctactgtagctttgaggtctttttgttacagcagctcaatctatactctcactgattcataatctttgactgtagcagggttaagcctcaaatttcccaccaggagatgacgctgtgattctgtgctgactacacacacattcaagccgtcttgagtgctttcacattttattttcaagtataaaggcttcatcgcagaaggaggccagggttacaggcagtgggcaaggggtctggaagcccaggtttaggtggacgtgcaggctagctggctcccaggtgccatggccagtcctgtggtccctgtctgtgcctgggaccctcttctgggtgccaagaggccgaggtagctgtgagaggagctggacatggggtggaggggcatgggttcacatgaccgcacaacactggcacgtcttttgcttagggccacttgcctcttcaccctcggtgggggcagatggctcaggctgccgggcaggcgcgtaggtgggcacagggtgggcactggggttggcgctgggcccctccccctgaagcagtggctggcattcggcgggctgctctggggctggggtctctgccagaagaggtgtggcatcccccaaggggccttggccctcagcagcggtttggggcttcactccttcctcctccagggctcctactggcttctcctggggctggggtccttccttctctggccttgtctccgtgttagcctcaaggggaggccctgcctcattcatctcctctgcctgggattcacttccttccctagacccttgttctagattcagatctccctccgtcccttgggtcttctctgtctccaatgattcctcacctccccttttctctgcctccagtgtctcctcccctccctttctctctgcctccagtggttctttggttgcctctggctcttcctcacctcctttcttctctactcccaatggttcttctacctcctcctcctctgcccctcgcttttcctcatctccttccttctctgccctcaaatgtccctcaacttttctctctatgcccagtggttcctcacctccttccctctctgttcccagcttttctgcacttcctctgctctccagctccaacttcttctctcctcctttcctctctaccactggtgacatctccgcttcatccctccctgtccctggcttttcctcacttcctattcccatggattcttccgcttttctcttctctgcctcccaggtctcctcgcctcctcccgtcttggccccctcggcccccagcgggctttcatctcctctctccctccctgccacctcgggcccttccaacccctccaccagcagctcctcccactcttcactgagggtcactctctccacccaaatgaaggatccctcctctcctccagagcctccctgcccatcaccctcagggctgccctggggcacatcttccccttctatggaagctgctgcctctaatctctcctggagcctaggcgagctagtctgcacgacctcagggaccctgcctatctcccccatggcctctgcatcactgccacccaccccctcccagaccacctccacgatgcccctgtcctccttcacccaggccgggagctccaggctaccagctcccttcctgtctccgatggcttccagcaccacttcctccaccttagcctccagctcggggcccgtggcccctgtggcacagtcctctgtggccctcagcccttcccacaccacactcaccacgccccctcctttggcctcacccacccgcccttcggatggcactgccctctgacttagcccctgctctggagtggggatggggctggggcatgggccattggcttctgaggagtctcctgctgccccggggacctgcctcgggcctggcagaaaccccaagacatcctccctgggctcagagggggactctggaggcgtgcccactagtccagccggcagggaggctctcttgttcagatcagtctggcctgggggagtcagaggtggaggggagaggacaaaagggaagacagggttaagatggaacaaaaggactgccatccacactccccttgagtcaccctctcacacccaggctctggggtgacctgacccccagacctaggggctcccacacttacctacagaacctgcctcgacaatggactgggagagaggacggtgaccctgcagagatggcggagacaaggtcaggctggccctcatccccacctccagcctccctgcatgctaggctcccaccccaccacccctaaataccctcagtggctctctattaccttcaggatcaaactccacattgtacctctgccttcctcatctatcttattgccctatgttccagggccttgcacacagtaggtgcttaaacaatactgcattcccatagccaatctgtattaggggcctactttgtcagttactggttaccatgcacaagggacacttaagccttttgtttttggcacttacattccaatcaacataaatacaaattaattttttttttgagatggagtcttgctgtgtcgcccaggctggagtgcagtggcgtaatctcggctcactgcaacgttcgcctcctggtttcaaacgatttccctgtctcagcctccctagtagctgggactacaggcacctgccagcatgcccagctaatttttgtttgagacagagtctcactctgttgcccaggctggagtgcagtggtgtgatctcagctcactgcaacctctgtctccagggttcaagtgattctcctacctcaacctccccagtagctgggactacagggacacaccaccataccgagctaatttttgtgtttttagtagagatggggtttcaccatgttggccaggctggtctccaattcctaaccttaagtgatccgcccacctcggcctcccaaagttctgggattacaggcgtgagccaccatgcctggcctatactgttgttattcccattttagagatgggaaaactaaggcttggaaaaggaaattgacttgccaagaccacagagcaaagtaaaagcgggaagcggatctgaatgcagacctagtggccaggctgcccttggagaaagctgcattcctgattccatgtcctgccttgaggcctgctggccatgccctcccatcccactcccctgattcccccctcacctgtctgcgccagctgggcctgcctgagggcttgtgctgggcacctgtggaagcactttgcaacagttgcagctgggactggagtctgaagaagagagagggctgctaggagctgggcccccaggctccttgggctcctagactcaagcgaccacctccttggaatgtgcccagggtctcgatctcacccagctggggcagggttcgggcagagctagaaggtctccactcacgtgaacaaactgtcttccaggttccggattcgggcctgagcctggccctcgggtgactgggggtccttcgaggtggggtcttcggatggctctggcactgcagctgccccatccattagccaacgttcccggagagacttcctctgggcaggggaagggagttggggctgggcatacagactaccccggtccatgtaaagtcccctcccgacctctgcaggctgggcaggtatcttatcaccacctcacaaccagttgcgacatacatcaggctgggatacatggccacagtgccccccaacgctgcaagtgggcagacatcccttgttccaaacccttccaaaatgaaacgggcacttccaaagtgaaatcaatgtccctccctactggcccctccctaccccaaagctagacttcggctcctctccatctcccccaaattgggacaaacagcatcactgtcccagacttttccccaaatggaacaaatgtccccatgaccaccccacttcgtccctcccaggctgggaaagacataccccgccccggccaagctggaaccaacgcccccaactgcccgctcccccccaaaaattggacagaggctcctatcgtcccccaaaccgacttgcacagacaccccccactccattccccaggctaggcaggcgcccccgcccgcccccaaccttgagacgctccacgcggagtttctcctcctccacctcccggcgcgcggcgcggatctcctcctgcagccgccgcttctcctgcgcacagaggacccggagctgcccgccggccgggcgcggcctccaccacctcctcttccctccctttcccctccctcctccgcggggctcaccggagctcccggggctcccgaggcagcgagcccggcgggggtggcccagcgcgggtctgcacccagggcggggagggggctgcggaggcgctgactcagcggcgggcggagtggggggggcggggcgggggcggggccggccgcgcccgggatgctgcggaggcctcgcccgcgcccaatgggggtctgtggatggggggtgtagggggtggggccttgggacagctatcgggggaggggcagagctggggagctccgagatacgaggttaagagaaatggggatcaaagggagggtgcggccgtacgcggtggctcacgcctgtaatcccaggactttgggagaccgaggcggacagatcgcttgaggtcaggagttctagcctaccctggccaacatggtgaaaacccggctctactaaaaatacaaaaattagctgggcgtggtagcaggcgcctgtaatcccagctaccggggaggctgaggcgggagaatctcttgaactcgggaggcgcaggttgcagtgagcggagatcgcgccactgcactccagcctgggcgacagagcgagactccgtctcaaaaaaagaaaaaaggaggggagggtgctagtgagatgggggtccgaaatggggatgcagccatgggagcccagagtaatggagtgtagacatggaatctagagagatggggtgcagaggtgggggtgcagagagatggggtacagaagtggggtacagtgagatggggtacagaagtggggtgcagataggtggggtatagaagttgagtgcgaagagatagggtacagaagtggggtatagagagatggggtgcagggagatggggttccatagatggggaataaaaaggagggtgctagtgagatggggatccaaaatgggggtgcagccatgggggtccggagagatggggtgcagagatggggatcaaaaggaggatgctagtgagtagtgagatgggagtgcagccacggggtccagagatactgaggtgtagaggtggggatcagggagatgggatacagagataggggtcagaaatatggggtacagaggtggaggtatggatagatggggtatgtaagtgcgtgcggaaagttggggttcagggagatggaggagggaaggatgcaggacagagataggatcagagtggtagagacccagagatgggggagtccagagagacgaggaagtcagggatgaaagttcccaaggaaggactgtcaggatgggggctccgaggtagggagatttgagagatagcggtctgataaaaggcggtccgagagatgcggctcaggcatggggtttttgggaggctggggttcaggaatgaggcatagccgatgcaggctctggaagtgtgggggccacagctccccattctgagggtggtagtgaccagacaggaactggggggcagagggggctggagaattggtgtggggagccctgggcggggctggagctgagggcgctctccgcagagatgacggagagacgagaagggagcatggtggaaagtttgggggtgcccagggcgcggggagggcgtcacttacagcgatgacttctagccgctgccggtagagggagctctccgccatgggcctgttgggagagggcaggggcttcgaggggctcccatcttgaacgcccccctcttggccaagatccctgagcagtatggaaattgccccgagcccagcactttgcctctgtttcccctttgcacctgggaagagtctgggcggggggcgagggtcttgggaggggaactgagcagtgaccacgactggtgaggctaaagccctccctaaatctggctttgtctctctcagcctcagtttcctcatctgtaagatgggcaggaatagcttgaccaccctgtccttgccacccccgatctcagaggacgcttgcaaggagctattcatgcagggaaaagcttagggtacagtgctacaaaaatagtcccattgtttatgaataatcataatttatataattccatgatgaataatatgtatgattaattataataaccatctccagtccaacctgcagaaactctcaaatgccaccaggcccctaacaggctgtgtgcctctttctcttcccagtcccacaccctctctggacctcagctcctacccagaatttctcaagcgctgggggggcaagcgagtctgtggccctcccactgttgccatggtaaccccagagctgcctcctccacctgctaacccccctccctggggacaaggatcactgggtcactctgcctaggactggactctgagctgggaggagggggacttgccatttaaggtttaactcgagattcccctgtcattgtcttcctcaaaacatctctacttctcagcctccagagtggcctctggacccacttaggctcccgtggaagctggagggtgactgtcatactgcaggatgattagggacagtcagtgtcacaccaaccttatcaacacagacatgcattgggcacccctgactatgttgctatgttgaccacgtgtcacaggccagtatctagaaagcgatgtctctctgcctgtcatctccaccggcatggacgggcgctgatcaaaccctcaaacatttattaatttgaacagtcaccctactgggtaagcctcattgcctgaactccagctaggaccttccagatcttctgtggccacaacgtgaaggctattagcacttatagtgctatatatatgatatatatatactatatatagcatatagtgttctaagtgccccacggggtttccgctaggttcccacagccacctctgcctccccctccctgcctctatcatgacacagtggagtcaactctttgctgagttgacattccagctaagaacaaaatcagccaaccattagctagcccgtaacacgtgccaggtgcaatgtaattcactgaatcctcccaacgactctaggaggtaagctatatgaatgtgtccattttatggatgggaaaactgaggttctgagaagtggcagcagtgtccaaggtcatggagccaagatcagaacttgaagctatcagatccaaaatactgagaacacagctggcgaggggggtgggggtgcaggtctaggaatccccatcaaggtagctaagagagcagcctggagaccctgaatgctgtttggggcaaggaattgaagtcatgctctttctttttttgagtcggagtctcgctctgtcacccaggctggagtgcaatggctcaatctcagctcactgcaacccccgcttcctgggttcaagtgattctcctgcctcagcctcctgagtagctgagattacaggcgtgcaccaccaagcccggctaatttttgtatttttagtacagatggggtttcaccatactggccaggctggtctcgaactcctgacctcaggtgatctgcccgcctcggcctcccaaagtgctgggattacaggcgtgagccaccgtgcccggccacgaagtcatgctttgcaagatatcccaaaggaagcccagattctgtgcttataggtttgcccctgggggagggctgaagtcccgtggtctcctgtaccacccccaagatgtaatctccctgcctcttccttgctgggggggatcgggttcccattgctaagcaaccaggtttgtagttggtgaataatgcaatggaggacctagaagggtgaggaaccgaattggggtccctagtgtggggggaagccccttttccaaaactctttccaaacctctgaagccccctctacccttttaaccttaaaaaactctcacccctcagctatgaaaagacttcacacaccccattccatcttgcttatctctaactaactctggaagaacaacgtaggcggcctgggcttctggccacccgcaagagttggtggccatttcatgaaggaggtcatccttgcaatgttgccattgtctttctcaggctgggagcttttaacttctgttggatctcaagccttttctcccaccttggacactgactttaggggcaaaacgtggaacccagtgaccctgaccttccccactccctgcaccacagcagtagccccaccccctggctggactttgggttctcagccctggcagcggaaaatccccgaagaggaaggggcagggggagcctatatctctctcccaccccttgactctttaaggaagggtgacactgatgagcctatggggttggctagccaacccctccactccccgggtccccttaggagagaccactggagctctcggctcccagacaaggccagcatcccccatgagcccctcccaaggccctgcccaccagcccccctgaccccccagacacttacatgggtgtggccagagaccacacctggctctgcagggccatctctgcccagaagttcactttctggtctccgagttctggacccaccacccgcttgcctgaaggtgccccggaggctgtgacttggctgcctggagtgggggggggctgcgggcgggcaccgggagagcaggtccagcgggtttgggccagggaggcggtaggcacaccagagaggggggctgggggctggagggcagttctggggaggtactatcagctgtcctgataaattattcaccagcctctggcctctttgttgcactcagctgcctcccggaaaacactttcacacacgcgtggtcaagcgtgggggtgagagtactgagtcggtgactccccctgccaccagagaatggcatttctacttggcaccccaatcatcttgagtctgactgcctgccaagactcacccacaggagagcaccattgcatagcacacaggctggagactgttttatttttttagagatgggggtctcactctgttgcccaggctaaaatgtagtagtgcgatcatagctcactgcagtttcagactccggggcgcaaacaatcctccctcctcggcttctcaaagtgctgggattacaggcatgagccaccacatctggcagataacattttttaaaattattttttaagaacaggcacagtggtgcatatgtgtaatcctagcactttgggaggcccaggtgggtggatcacctgagggcggagttcgagactggtctgaccaacatggtgaaaccccgtctctgctaaatacaaaaaaaaacttagccgggcatggtggtgcatgcctgtaacctccgctacttgggaggctgaggcagaagaatcacttgaacccaggtggcagaggttgcagttagccaagatcgcaccattgcactccagcctgggcaacaagagcaaaactctgtctaaaaaaaaaaaaattactttttgagccaggcacggtggctcacgcctgtaatcccagcactttgggaggccgaggtgggcggatcacgaggtcaggagtttgagaccagcctggccaacatggagaaagcctgcctctgctaaagatacacattagccaggtgtggtggcacacctgtagtcctagctactcgggaggttgaggcaggagaattgcttgtacccaggaggcggagattgcagggagctgagatcatgccactgcactccagcctgggtgacggagcaagactccgtctgaaaaaaaaaaattactttttgatcgtggtaaaatacacataacaaaatttaccattagtggcatttagtatgttcacaatattatgcaatcctcaccactggttcagaatattttcatcaacccaaaaggaagtgatcactactcattcccctgcctcccgtgcctggcaaccaccaatctgtgtccatctctatggatttgcctattctggactttttgtttttcttttttgtttgtttgtttttttagatggagcctcactctatcgcccaggctagagtgcgatgggcacaatcttggctcactgcaacctccacctgctgggttcaagcaattttcctgcctcagcctcccaagtagctgggattacaggcacccgccatcacgcccagctaatttttgtattcttgtagagacagggtttcaccatgttggccaggctggtcttgaacttctgacctcaggtgatccatcctccttggcctcccaaactgctgggattacaggcgtcagccactgtgcccggactattctggatagttctataaaaatggactcacaggccgggcgcagtggctcatgcctgtaatcccagcattttgggaggctgaggtgggcggattacctgaggtcaggagttcaagaccagcctgaccaacatggagaaaccctatctctactaaaaatacaaaattagccaggcatggtggtgcatacctgtaatctcagctacttgggaggctgaggcaggagaatcacttgaacccgggaggcggaggttgcgatgagccgagatcacgccattgcactccagcctgggcaacaagagcgaaactcggtctcaacaaacaaacaaacaaaagactcacacactatgtggtcttttgtgtttggcttctttcactcagcatcacgttttaaaatttcatccatgtagcgtgtatttatcgttccttaattcttttttttttttttttgagacggagtctcgctctgttgcccaggctggagtgcagtggtgcaatctaggctcactgcaagctccgcctcccgggttcacaccattctcctgcctcagcctcccaagtagctgggactacaggcgcccgccaacacacctggctaatttttgtatttttagtagagacggggtttcactgtgttagccaggatggtctcaatctcctgacctcgtgatccacccgcctcggcctcccaaagtgctgggattacaggcatgagccaccgtgcccagcccccttaattccttttttatggctgaataatatttcatcatatgagtatactatattttgctgatccatttatccattgatagacatttgagttatttccaccttttggaggaaataaaatattctatttattatttatttatttatttgagacagtctcactgtgtcacccaggctggactggagtgcagtggtgcgatcttggctcactgcaacctctgccccccaggttcaagtgattctcctgcctcagactcctgagtagctgggattacaggcatgcgccaccatgcctggctattttttgtgtttttagtagaggcgggtttcaccatattggccaagctggtcttgaactcctgacctcaagtgatccaccccccaaagtgctgggattacagatgtgagccaccacatccagcctatttaattgtttgtagattgattttataactgttaaatatttagatgttggagccaggcatggtggctcatgcctgtaattccaactactcgggaggcggaggcaggaggattgcttaagcccaggaggttgaggctgcagtgagttgtaatcacgccactgcactccagcctaggtgacagagcaagaccctatctcaaataataataataataaggcattattctaggcatgggggcattgggtatagagatgaactagacaaacagaaaatgctattatgcagctcactttctcgtatggggagagagacagataatacacaaatagaaagaaatataaaagcaattggtgccgggtctggtggctcatgcctgtaaacccagcactttggaagcccgagcaggcaaatcaccttaggtcaggagttcgagaccagcctagccaacatggcgaaacccccgactctactaaaaatacaaaaaattagccggccatgcacctgtaatcccagctactcaggaggctgagacaggagaattgcttgaacctgagaggcagaggttgcagtgagccgagatggtgctactgcactccagcctgggcaacagagcaagactccttctcaaaaaaaaaaaataataaaaagaaggctggggccaggcacggtggctcacgcctgtaatcccagcactttgggaggccgaggcaggcagatcatgaggtcaggagatcgagaccatcctggctaacatggtgaaaccctgtctctactaaaaaatacaaaaaaaaaaagaaattatccaggcatggtggcgggcacctgtagtcccagctacatgggaggctgaggcaggagaatggcatgaacccgggaggcagagcttgcagtgagccgagatcatgccactgcactctagcctgggtgacaaagcgagactccctctcaaaaaaagaagaagaagaagaaggctgggcgcggtggctcatgcctgtaatcccagcacatcgggaggccgaggtgggtggatcatgaggtcaggagttcaagaccagcctggccaacgtggtgaaaccccgtctccactaaaaatagaaaaataagccagccgcggtggtgccaccagtaattccagctactcgggaggctgtggcagaagaattgcttgaatcctggaggcagagattgcagtgagccaagatcgcgccactgaactccagcctggttggcagagtgagactttttgtcaaaaaaaaaaaaaaaaaaaaaaaaagaataaaataaaaatgaaagcaattggtggcaactgcaattgggggtgagttattgagaatacctgaaatggggctaaagaaggagtgctcttgtaggctgggttatcagagaccacttccctgaagaagtgacatttgaggtgagacctgaatagaggaaccagccatgtgactgtcatttcaagcagagaaaacagcagtgcaaagaccctgaggtgggaatgcagttgggggaggggttaagggaagtacgaagctgaaatgaagtgacacaaggtgacagtgtgagaagatatgacctgagaagtgggcagggcctgctggggcaaggtagagaattcgtatttttattctaaatttggtgggagcctttgttttatttgtattattattattgttttagagatggtgtcttactatgttgtccaggctgttcttgaactcctaggctcaagccatcctcccgcctgagcctccagggtagctaggattatgagcaagccactgtgcgtggcttgatgggaacctttgagagggaggaggtggctggaaggaacaaggatggagagaagtggatgaatccaaaatctgtttggaggtggagtcaagagagtttgctgatgaattggagggtggctaaagaaagaaattaaggctgactcctggggtactttttggcacgaaaaactgaatgggtgaaattgacacacatggtgaggaggagtagggttggaagaaccaagaatgtggttttggaagtgttcagtctgaaatgtctattagaccggagactgctagatatgagtccaaagcctagcggagcagttagagttagagatataaatttgggagacatcagcataaagattatatatatataatatattaatatattatatatattaatatattatatataaatatattatatataatgtattatatattatatataataatatatttatttatatattataataatgtctataaatatattatatataatatattaataatatataataataaatacataatataataataaatataaatatattattaatttattaataatttattgttgatatattattaataaattaataaatataaaaaataataatataatacatatattatatataatatattaatgtattatatattatatattaatgtattatatattatatattatatatataaatatatatataatatttatatttctatattaatatattatataattatataatattatatattatagatattttataatatattatatatatattagaagtggagtctcaccacttgccacgttgcccaggttggtctcaaactccttgcctcaagtgatcctcctgccacagcctcccaaagcactgggattacaggcgtgagccactgcacccagcgtagatttttttttttgagactgagtctcactctgtcacccaggctggagttcagtggcacgatctcggctcactgcaacctctgcctcacaagttcaagggattctcctgcctcagcctcctgagtagcaggcccacaccatcacgcccacctaaatttttttgtatttttagtagagacggggttccaccacgttggccaggctggtctcgaactcctgacctcaagtgatccaccacctccgcctcccaaagtgctgggattacaggcttgagccactgtgcccagcccagcctagatgtttaaaacatgagattgaaatttgtcagagcctgagtcccaataggaaagattgtgcacttgaggctgggggcagtggctcacgtctgtaatcctagcactttgggaggctgaggcgagtggatcatgaggttaggagttcaagaccagcctggccaagatggtgaaaccctgtctctactaaaaatacaaaattagctgggcgtggtggtgggtgcctgtaatcccagctactcgggaggctgaggcagagaattgcttgaacccaggaggtggaggttgcagtgacccaagattgtgccactgccctccagcctgggcaacagaacaagactccttctcaaaaaaaaaaaaaaaaaaaaaaaaaaagtctgggcacggtggctcatgcctgtaatcccagcactctgggaggctgaggcaggcggatcacctgaggtaacaagttcaagaccggcctggccatggtaaaaccccgtctctactaaaaatacaaaaaattaggtgggcgtgctggcacatgcctgtaatcccaggtacttgggaggctgaggcaggagaatcgctcgaaccccaagaggcaaaggttgcagtgaaccgagaacgcaccattgcactccagcctgggcaacaaaagcgaaactccgtctcaaaaaaaaaaaaaaagattgtgcacttgaacacggtggttgatgagaacttaatagaacccagtttataaagctggaggggaaaccatcaaggcacagtatagacgccctgggttagcaacgcctggcagctgtgaccacctctttgccctggagagagctgtgtagagctactgcctgtagcagagggatgtcaccaatggggcttggaggtaggggacacgggataaactttttcttttttttttgagacagagtctcactctgtcgcccaggctggagtgcaatggtgcgatctcggctcactacaacctccatctcccaggttcaagcaattctcctgcctcagtctcccaagtagctgggattacaggtgcccgccaccacacctggctaatttttagtattcttagtagaaatgggttttcgccatattggccaggctagtctcgaactcctgacctcaggtgatccacctgcctcggcctctcaaagcactgggattacaggcatgagccactgtgcgtggccaattttttttttttttttttttttgagacagagtcttactctgttgctcaggctagagtgcagtggtgtgatcacagctcactgcagccttgatctccctgggctcaggtgatcctcccacctcagcctcctgagtagctgggactgtaggcacacaccaccaacatgctgctaatttttgcattttttgtagagatggggtctcactacgttacccaggctggtcttgaactcctggggctcaagccatctgcccgcctcagcctcccaaagtgttgggattacaggtgtgaaccactgtgcccagctaaacatctttttttagtgttattttatttatttatttatttagagacagggtctttctctgtcacccaggctggagtgtattggcattattatagcttactgcggcctcaaactcctaggctcaaatgatcctcccacctcaggctcccaagtgcctgggcctacagacacaaaccaccatacccagctaattttaaaaaatgtcttctttccttcattccttccctccttccttccttctttccctccctccctccctccctttctttctctctttccttctttctttctttcttcctttctgcagagacagggtctccctatattacccaggctggtttcaagcaatcctcctgcctcggcctcccaaagtgttaaaattacaggtgtgagccaccgtgcctggctgggataaacaccttggcttcactctcctctctttcatcaggtgaccccaaggaagccagaggggaaggaaggtgaaacagaagtctgagaaggggtgcttgtgaagtagaaggaaatcaggagggggtggtgtacccaaagaccaaggagctaatgaagaggaggacagggaatgaagtcagtgattgaatctgccaaacggacatcataggtgctcttgtcagaaaaagctcccagaagccgggcgcggtggctcatacctgtaatcctggcactttgggaggctgaggcgggcagatcatgaggtcaggagttcgagaccagcctggccaacatggtgaaaccccgtctctactaaaactacaaaaaaattagctgggcgtggtggcacacgcctataatcccagctactccagaggctgaagcaggagaatcgcttgaactcaggaggcggaggttgcagtgagccaagatcacaccactgcactccagcctgggcaacagagtgagacttcgtctcaaaaaagaaaaagagccctttcatcaatcttcccgcgtccgccgattcctcctccttggtcgccgcgtccttggctggcgtcagaaaaatggctacaaacttcctagcacatgagaagatctggtttgacaagttcaaatatgacgacgcagaaaggagattctatcagcagatgaacaggcctgtggcaggtgcctcccgccaggagaacggcgccagcgtgatcctccatgacattgtgagagccagagagaacatccagaaatccctggctggaagctcaggccccggggcctccagtggccccagcggagaccacagcgagctcgttgtccggatcgccagtctggaagtggagaaccagagcctgcgtggcgtggtacaggagctgcagcaggccatctccaagctggaggcccagctgaacgtgctggagaagagctcgcctggccaccgggccacggccccgcagacccagcacgtgtctcctatgcgccaagtggagtccccggccaagaagccagcctcaccagcagaggatgacgaggatgatgacatcgacctgtttggcagcgacaatgaggaggaggacaaggaggcggcacagctgcgggaggagcggctacggcagtacgcggagaaggccaagaagcctgcattagtggccaagtcctccatcctgctggatgtcaagccttgggacgatgagacggacatggcccagctggaggcctgtgtgcgctctatcgagctggacgggctggtctgggggacctccaagctgatgcccgtgggctacggtatccggaagctacagattcagtgtgtggtggaggacgacaaggtggggacttacttgctggaggaggagatcactaaatttgaggagcacgtgcagagtgtcgatatcgcagctttcaacaagatctgaagcctgagtgtgtgtatgtgtgcgcgtgcgtaaggccctgccacgattaaagactgagaccggcaaaaaaaaaaaaaaaaaaaaaaaagaaaaaaaaaagaaagaaagaaaagaaaaagaaaaagaaaaaaatgttcccgtgaaagggggccaagaacccagcccagttggcatggctggaggaaggaccaggagatgatgcagtggggaaggtgctatagagaaaactttttcccagaagtatacagcttatttatttatttatttatttatttattttgagacagagttttgctcttgctgcctaggctagagtgcagtggcgcgatcttggctcactgtaacctccacctcccaggttcaagtgattctcccacctcagcttcccgagtagctgggattacaggcgcccaccaccaggcctggctaattttttttttgtatttttagtagagacggggtttggccatgctggccaggctggtttcgaactgctgacctcaggtgatcctcccgcctcggcctctcaaagtgctggcatcacgggcatgagcctccatgcccggccggtaactgtatttttccttctgggcaccccagaatggtggggttgggggcaggttctgggaagagtctgcttccattagggggaaagtggaaaacgtccctaggggagggtggcccgcgcaagggcatcgatcctgcccttgaaccgcatgatccggccccagctgctctttccccctaccctggacgcctcctgtttcctgtctgggcctccccaggcgcccgggcccaaggtgaccgcctttcaactgcaaccgctaagctgcgcccacggcgcactgtgtccgtctctccctcctccctcaatccgggagtgcccttggcagcggacacctcccggatttttccgggaggagaggggaagccgcttctcggcttggcgtgggggcagtggtgcgcggctgggaacctcgctgagcccaagcattggtagggagaccccagcggccagtaaggcggctcctggcgccccctcgggccggagctgtgcgctgcaaggctggatcggagggagggcccaggggcctgaggagtcgctgcctgccggctggcacgaccaagcgggactgcccgggtcccgaaaatacggcttcgggggacacctcaccaagcggctagtggttcagaaccccagtccgacgcgctgctgggcccagtctccgggacgatgacggggacatggctctgaaaaagtgccagggtgcgctcagtagaacccagcacccagaatggccccccagagagcggggccgggtctagggaagccctcttccaagaagtcccgtgccctgaggtgactgggcgcgctagttgatgaaactgagtgccccaccgaggcgcccctgtcccgagggcggggccagggcggggcgggagtcctcctggcaggtgccgggggcggtgcccggccctgcccccgggggccgttcctggaggccagaggcgggtcagagaagccgccggtgcgggcgacgccttggaacccacggccgccactgccgccacaggtgcctcacagtgccctctgtcctcgctctgggaatcaaaaccccggttgggaactgaggcttccgaactgcttccaaccctggacacgaaggcccccaccggccggagaacgaaaccctggggtcgtctgaagaggagggccaggagtccccagggccagacagcgaagccccagagctgctgcggagctgaacaccgaggtccccaagccctccgcaaaggacgtggagatcctggagcaagagagcgaagtcctcgagccatcagtcgagcaggacgcagagagccccgggctgtccacagctgcgggctttgagagtcctgagccaggcagagacgaccctgggccgtccgaagcgcaaagggcggaggtccaggggcagcatccccctccaggccctaagacctcctcctccaggtcaggctcggaagccccccacctgcgttttccgccgtgccccgaggctccccagcgtcccccggaggagcggttcatggagacgcccatcgagcgcgaaatccgccgcagctgcgaacgcgaggagagcctgcgccggagccggggcctgagcccgggccgcgcaggccgtgaactcgtcgagctgcgcgtgcggccggtgctcaacctgccgggtcctggccccgcgctcccgcgcgccctggagcgggcgcgggcgggcgcgcagatgcagcgggacatcgagcgggaggcccaccggcaggcggcgctggcgcgccccgcggtccccgagccgcgcgcccggtcgccgccgcagccgctgggcgaactcaagcgcttcttcgaggccgcggcggggagcggctcctcggcgggggcgggggacggcgcgggcccgcagaggctgccagagcctgggggacggccgcgctcggccgtgcagggcgggtgccgggtgctgggcagcgccccgccgcctttcactccgtcactgctggagcaggaggtgcgcgccgtgcgcgagcgcgagcaggaactgcagcgccagcggcgcagcgtctatggcaccgcggagttcaaggagcctacgccgagcctcaccggtaagccgcgggcgtagcaacgccgggacccccagggttccagccgcccccaccgattgcccaacttcagtggcccctcctgtggccctccgattctcggggtctctccctccaagctcccagaccccctctcaattttgtctcttgcctaccccttctggagctccattactcgctgtgatccacccctccaccgggagtgatggactctctgatccacaccacccaggctgcgcgggggtgggggcattccagatgtcttcctttttgtcgggttccagggaaccctgactgggttctggcactcctgggtcctccctctgaattttcgggctcctgcttctccattctgggttcacctccctcctccctcgggttcctgggtgcctggagttgaatggaggctttcatggggaggcggagggtgaacgcctgtgtgtgtttaaggggtgcggccggcctttcatcctggctgccgccagctggtgagctgagcgccccttcccccgcagcgagcaggggcgacggaaagttggtggtgatctggcccccccgcagaaaggtctcggagaacggcctggagcaggtgggagcccccttacccgtgtgcctctagcgcttgtcggtccccccacccctccggtgccaggacgcttggtggggaaaagtgcatcctccctggagggccactctggtcagaactcagtctgggacgcatccccggggtgaagaggagacggtggtcttgaggcccaaaccgccaccccgagcctggatgcagtgcgcaggtccctgaggccggccttccttctggtcctctgtccccaggaggagcgcaaaccttgaggtttgaaaaggctgggacccccggccggaagtaacgtacgcgtcagaggaacagggcggggggcgtctagcattaggcctggagaagggtcggctctctgcattggggaagatgaaatcgacttgcctttgtgaaattgaccagccccctctataaaacttacagtcccccattgggaaactgaccaccacccacaactccgccagtgaaactgcccagcccttctctgcctaattgcaaactgaactaccctctcccttgactgttaagagggccggagttaccgcctcgattgccccactccccccacccccaataaagcctcttctttcagggcactgcagcctgtttttttctgggtcctcttcgtctggggtggggcgggagcacggcgggccgagggaggcccgagaaaaccccaagaggtgcgggccggaatgcgggaatgcgcccttaccgccctgctctggggctgcccgcctcccccggcacggccagacacggcctggcccaggtcctaccgccccctggcggcccgggcgcaaaatgtggcgcgcttaccgagttcacaccctctcgtttccaggcttcctcgtcaacatttattggtgccaacgatgtgccctgcgctgggcactggctagacagtggtgataagaggctgttcctaccctgggaacgtaaacaatagctactaaaaaaaagaggtggtgagggttcaggcttctcaacattattagttcctaatgatcaccgttcttcttgacctcatgggtcctcactatgagacgtgctcattcgtggtgttgggtcaagagtttctgctttccaaaagcatccgtggccgggcgcggtggctcacgcctgtaatcccagcactttgggaggccgacgtgggtggatcagttgaggccaggaattggagacgagcctggccaacacggtgaaaccccgtctctactaaaaatacaaaatattagccgggcgtggtggtgcatgtctgtaatccagctactcaggaggctgaggcatgagaatcacttgaacccaggaggcggaggttgcagtgagccaagaacgggccactgcactccagcctgggtgacacagtgagactctgcctcaaaaaaataaaaaaggcaactgaaacctggcttttaagagagaaatctgcatttttatgattgtgactatttaggaaaaacttttttttttttttgagacagttttgctctgtcacccaggctggagtgcagtggtgcgatctcagctcactacaacctttgcctcctgggctcaagcaattctcctgcctaagcctcccgagtagctggaattacaggtgcacatcaccacaccggctaatttattgtatttttagtagagatgggttttcaccatgttgtccaggctggtcttgaactcctggcctcaagtgatctgccggcctcagcctcccagttttttctaggcgccctgcctagaaaaaacttttaaagttgtgcgggaggagaggaaggaaggaagttggcaagcaacaactgtttgcaatagggcctgtggctgtcaatttgcaagctctggttaatttctctcccctggatgggggttcaagagggtgggtgaacaccctaaattgtctctaaaactgtatctgcacagttaacattctgggactatttttacagtgtcttagaagtgcactgagggcctggcgcggtggctcacgcctgtaatcccagcactttgggaggccaaagcaggtggatcacgaggtcaggagatcaagaccatcctggctaatatggtgaaaccccatctctactaaaaatacaaaaaaaaaaaaaaaaattagccgggcgtggtggtgggtgcctgtagtcccagctactcaggaggctgaggcaggagaatggcgtgaacccgggaggtggaggttgcaatgacccgagattgcaccactgcactctagcctgggtgacagaacaagactccatattaaaaaaaaaaaaaagaagtgcactgaggaccagacatggtgactcatgcctgtaattctagcactttgggaggccaaggcaggaggattgcttgatcccaggagttcaagaccagcttgggcaacatagcgagacactgccccaccccatctctacaaaaaattaaccgggtgtggtggcatgtgcctgtggtcccagctactctggaagcttagcaggagatcgcctgagcctgggaggttgaggctacagtgagctatgattgaaccactgcactccagcctgggtgagagtgagatctgtaacctaagaaaaaaaaaaaattcactaagaccagaaaaggggagacccaggaagtttaaatttaaaaatgttttcaattttggagacaagtcttgttctgtcacgcaggctgcagtgcagtggcatgatcacagcttactgtaaccttgatctcctgggctcaagtgatcctcctgcctcagcctcctgagtagctgggactacaggtgtgaaccaccacacccaacccaggaacattttagaatcgctgtttcaactcttggctcttgagatcgtgtcactgcactccagcctgggtgacagagcgaaactctgtcttaaacaaaaacaaattcttggctctgtccaactctgtctcttgtataggggcatcaaatgtctagtgaaatccatatgcataaaatacagagaggtcatgctgatacaaggctgcacccaagagcagctcagcccatgaagggctcatcagctgaccccatcctcagcccagtgaccccatcctcagcatacttcactgtgactgtgggagctatgtagagaaaggcggagagagcctgggaaggtggaaaatggaaacacctagaggctggtcttaatttccagcaggggagccaagaactaagtatgtcatgagtggacaggggccgggcatggtggctcatgcctgtaatcccagcactttgggaggccaaggtgggtggatcacctgaggtcaggagtttgagaccagcctggccaacatggtgaaaacccatctccactaaaaatacaaaaattaggcctggtgcagtggctcatgcctgtaatcccagcactttgggaggctaaggcgagtggatcacctgaggtcaggagttcgagatcagcctggccaacatggagaaaccccatctctactaaaaatcaagaaattagccaggcatggtggcgcatgcctgtagtccaagctactcaagagactgaggcaggagaatcacttgaacccaggaggcagaggttgcagtgagccctgagattgcaccactgtactccagcctgggtgacagagcgagactccatctccaaaaaaaaaagagtggacaggactacttaagtatagatgagggattctctaacttttctgaatattaaactcaactgaggcccccatatgtcaagtaaatcagaatgggggaagggcttgacatcagtattttttgaagctcccaggtgattacaatatacagctgagtctgagaaccatgaagtaaatataaaccagcagttctcaatgtagtggcaccaggaccagcagtatccgcaatgcttggggaattgctagacatgcgccttccaggggccaggtgtggtggctcatgcctataatcacagcactttgggaggctgaggtgggataattgcttgagtctgggagttcaagaccagtgtgggcaatatagcaagacaaagtctctaccaaaaaaaaaaaagagagagagaaaaaaaagcactttcttgggtctcatcccagacttaatgatcaaactctccatgtgattctgatgcacactaggaagtttgagaatcaagggtgtagaaagctgctcagcaacaggacccaggaaacaaagcttgtttccttccccttccagtactgtactgtcaccacccacccgaaaccctgtcttaagagacagtggatttgacttaaaggagaccgtctagagctgcttgtggctagtctgaattgagatatgttgtaaatgtgaaatgctagatttcttttcctttttttttttttttttttttttgagatggagtcttgctcttgttgcccaggctggagtgcaatggcacgatctcggctcactgcaacctccatctcctgggctcaagcggttctcctgcctcagcctccagagtagctgagattaccagcacctgccaccatgcccggctaatttttgtagttttagtagagatggggtttcgccatgttggccaggctggtctcaaactcctgacctcatgatctgcctgcctcggcctcccaaagtgctgggattacaggtgtgagccactgcatctggcttttttttttttttttcagatggagtctcgctctgttgcgcaggctggagtgtagtggtgcgatctcggctcactgcaacctccatctcccagatttaagcgagtctcctggctcagcctcttgaatagctgggatcacaggcgcccaccaccacacccaccttttttttttttgttttttttttttgcatttttagtagagacaggattttgccatgttggccaggctggtctcgaactcgtgacctcaagtgacccacctgtctcggcctcccaaagtgctgggattatgggcatgagccaccatgtccggccaagatttctaagacagtacaaaaaaggaaaatacctcaataatttttttacatggattatacattgaaataatattttgggtataacaggttaaataaaatatcacgaaaatgaatctaacctcttaattttttattttttatttttttttgagacggagtctcgctgtgtcacccaggctggaatgcagtggtgcgatctcggctcactgcaagatccacctcccgggttcacgccattctcctgcctcagcctcccgaatggctgggactacaggcgcctgccaccacgcccggctaattttttgtatttttagtagagacggggtttcaccgtgttagccaggatggtctcaatctcctgacctcgtgatccgcctgcctcagcttcccaaagtgctgggattataggcatgagccacggcgcctggccctaacctcttaatttttttatgtggttactagaaaatttgaaactacatacgtgatttgcgtttgcagctcacttgatatttccattggaccccacgagtctaaagaatcttaaaggccgggcagggtggctcatgcctgtaatcccagcactttgggaggccgaagcgggaggatagcttaagccaggagttcgagaccagcctggtcaacataggaagaaccccccccttctctacaataataataataatataataataataataaaataggggcatcgtcgctgcctgtactcccagctgcttaggaggccgaagtgggaggatcacttgaacccaggagttagagtttgcagaagttggaggttccaggattgcgccattgcactccagcctgggtgacagagcaagacccttccctccccccgaaaaacatcttagagccacaggaaaactcacagggactccctcaaagcggtatcagggagcatcaggatttccttgatgtcattcagaccacagctgtggactaaaaaacatccttgatgcagtcagaaattgtcaccagaaatacccatggaagagcaatagtggccgggcgcggtggctcacgcctgtaatcccagcactttgggaggcagaggcgagcggatcacctgaggtcaggagttggagaccagcctggccaacatggcgaaaccccgtctctactagaaatacaaaaactagctgggcctggtggcatcagcctgtaatcccagctactcgtggggctgaggcaagaaaatcacttgagcctgggaagcggaggttgcagtgagccgagatcatgccattgtactccagcctgggcgacaagagcgaaactagtgttggcattcaatattgattcatttcacctctaacgtccttttttatcatctggaaatggaggctaatactatgtgccagggactggaaggtaggtgctttgctcaaaatcataaataagggcagggctctgggtgtctcctctatgaaaatgctgccgggggcggggggaggggaggggaggggaggagaaccaaaagggtccctcttggattaaaggggtataacccgcagctgagtgacacctggctcaggaggacacccttcctccttgcaacgggccacaagtaccgggttgcgatcacaagtacccggttcaggtccaaggtccgccacttgctcgcaggagctttgagcaggtgagttcatttctctcagccagggtctcctctccagtccgagattagagagaggctgagagatcctaagcttggataccgtagggctctcccaccttgtccgcaccccggataccccaagaaagacgacgacctgtccggcccccaagtcccaaaagctggaagagaaaaaaaaagtctaactcgggcccttaggaaactgatcgagggcactttcctggggcgcgtcgggaaaagtagtcttctacgctaaaataaataacttccgggtcaaaatatgggagtgggcgtagccttaagtctcttcctccagtggacgttgaatttccccggtaccctaaacttgcagttttctgggttccggtgttgacgggcaccacttccctttttgcttcatgtgcgcctatgcgcatgcgccaaactctcgtccgcctattggcgaattccaggcttctttcaaaagactacatttcccagaaggccacgcgagtgggtggggcaatcccccgggggaggggcgcggcattcgcagcggacgctgagcctgtgacctctttctttcttttatttaacacaaaactgacgtgtccgcattcagggccccacggccaagccggactcggtgcagacaggtcagctcggcctggccctttggaaggcgaggccgggctgcactgcgagaacgagtgagcccctcccctgccccctattctggagtttggaactgtcaagttccagctcctaccctcttccccaggttcaagacccctgcgctgcccaccccgcaggcccggctgcgctcggaggccgggcctggcctgcctggcccgtgaggatctgcaccagcaggtcggtggccagcgtgggcgtgggctcctcgaagccgatggtcagcagctgctggtagtccccaagcggctgcgggcacaaaatcctggggtgggggggccagggatagacaggcctggacttgagtgccccctgcccctcgggagtccctccctttgagtgagaggctcaggtgaaagaggctttgtttcagctgcgggtgggaaaaacccccgggggaaacttgtttccttgttgatcagagacttagtaatggctcctagaggctgaataactggtcctgacctgtccattcgctctgctagctgtgtgtccttgggcaggtaacaacttctctgagcaccctgttttctttgttaaatggggccaatagcatagatctccatgggttgttactggggtctgcatgaagtgcttttcagggcacaataaaatgctatcactactaagggaagcaaagtgtttgggaaggtggattgtctttggtggggttctgcctccccctccagctcccaggcccacgttgctattgccctagctcctaccatgaataaaggtcatcctcggctggtcctaggggcacccatcggccgatggaccacagcttctggatctgtgggcacgaattggctggactctggcctgtgtcttcccaagtatctcgatagcacagaaagtagctaggaggggagggagctgtaattagaagtgatcagcttcctagctacttctgttgagggctttaattttggagttgaggtgggaactcatcagaagttgccctgaagttctcaggtaggaatgtgactccaaggccttttctccctgccagcctacttttaagatgagaacttttattttggtgggagggtgggttttaagaaaatagaggtagcctttcaaaagcctttagtttcctggttcacttttttttttttttaagagacagattattgcttccactcagggtggagtgcagtggcacaatcacagctcaccgtagccttgattcctgggctcaagtgctcctcctgcctaagcctcccaagtagctgggactacaggtgccagccatcacgcctggcgaatttctttgttgttgagacagggtcttgccatcttgcccaggctgatctcaaactcttgagctcaagtgatcctcctgcctcggcctcccaaagtgttgggattacaggcgtgagccactgcctcgggccctggctcacttttcactttgctggtgacggtttggagggtcatattggcattcatcatagaaaggggaggactttgatttgggtaagaggacttactaatccacaagggaatcttgtccccgaccaggggcctctggggtggcttccaggtgccagcgcatcttcttatagaggtagcgggggaagcggctggcagtgtaggcggttggggcacagtatctgaagatggagacctcatgggacaggctgatggagaacctcccgcaaaagaaacaggagatgctggcgagacatgagagaatggaggggtgaggctgggccttggactccttcatccccccatctgagtctcctaccattttacctaagggggttcatctcctccaggtccacgaacccaaaggaagcgtacatgaggaccagctgttccaggcgcagggtcagctgttgggagatctctaacagctgcatacaagaggggggtacagtgagatcagctggcctgcgaggagtgggcctccccctccaccatccccacaggctcagagctgcgagaagaaaggggcgtggggtctaagaaacctccacacaccccctttcggaccagctcctgcaggggtccatagatggggggtatgcttctcgcggctgcctccaggtacaggaagtagggctcacacatctgtaagaaggtgggcatggccttggccagctgctccttctgtacttggtctctgctgaaggaagaagggggcctttgcctggaatccctcacaacccctccccaccccgcagttttccccattctactcaatcccaacctgtatccctggctttgacccattagaaaagcccccagtttcaggtcttttctgaacatctttctggtttacctgcatcaaacccatttggaacacttgttaaagtgctgacacctgagtctcacaacacttaggacccagagcttcctgcagggtctgggcgcagtggctcacgcctgcaatcctagagttttgggaggctgaggctggaggattgcttgaggccaggagttccagacaagcctaggcaacatagcaagaacccatctctacacaaaaataattagctgggcatggtggcacctgtagtcccagttacccaggaggtggaggtgggaagattgcttgagaccaggagttcgagggtgcagtgagctatgactgccccactgcactccagcttgggtgacagagcgagaccctgtctcattaaaaaaaaaaaaacagcctcatgagaatccctcgaacctgggaggcggaggttgcagtgagctgagttcgccccactgcactccagcctaggtgacagagcaagactccatttcaaaaaaacacataacaacaaaacaaaacaaaaaaacccagcctcgggtaggcgcggtggctcacgtctgtaattccagcactttgggaggccaaggcgggtggatcatgaggtcaggagctcaagaccagtctggccaagatggtgaaactctgtctctactaagaaaagaaaaaaattagccgggcaacacatgttggtgggcgcctgtaatcccagctactcgggaggctgaggcagagaattgcttcaatccgggaggcggaggttgcagtgagctgagattgcaccactgcactccagcctgggcgacagagtgagactccatctcaaaaacaaacacgcaaacaaaacccaacccagcctcctaggaaattccaatggacactgaaattgagagtcacagggaaacctggtctgggaatcacattatcctttggagtctcaaactgatgtcctgcaggccaagtttggctcaggtgggtcttgtttagccagcacagggctcaaaatgtaagacagcacttaaaaactgggagaaaaagtcctagagacttgacaaccccaggcccacactgccacgacagtaatagcagccatcccctacccgcaattctacagtcttcctcattctcttaaactggattctaatatgctagcttcttccactgtctccctctggctcctagcgcttgtaattttgcgaccctggtgtgtgtcacccatcctgtcgcctcccctccaagtctccttacccatggggacctgggaccctgtccagcatcacctgtagagcaagtagctctggaaatcatctgccttcttcagtaggtagcgcagctgttgggtgatggggctgaacaaagtgtccagggataggcggggaggtgctggcccaggccgggggaccagaggtttgggggaagacgtggaggcccgggcctcagccagccgcccctcggcatcttcaggatccggctcagatgggttcccaggcctgccagggggcgtcgacctggaggggtctccgcagggcggcgtcccaggttccaaggcgtctggaggcggtgtttctccagggtccagggggagcgacccctcgaaccactgctctgtagccatggtagggccggggggcgggaacctgagctctttaagcttccgctgctgctcaggttggccgcgggttcgaccccgccccgggagcctccgactggcccctgccttgacctctccaccggagccgcgccgccgcgccgggggccgttcgcctcttttgaatttcaacacgcgggaggggcgcgcctctccagtccgcgcgcctgcggccccctacccctgcacacgcgccgcacgcgctccaggaacctggcggtggggagggacccgcctagggaggtggcctctggccgtgtcctgggggtgtggctagggccgggacctttatctctcgaggtggattcctagagtggaggggtctctaaacgtgtctccaacccctcaacccggcacaggtatatggaatgaggccgcccaggccccagcccctcactcccagaacgctttttgttgttaaaacatttttttaatttaaaatttttagagatgggggcccatgttgcccaggttggtctcaaactcctggactcaagcgatcctcccgtgtcggtctcctaaagtgcccagcctctttttttctttaaaaacaaaaaacaactctaatgagttgagaaactgccttagaacttagtagggactacttagaacttagtagggactttggatgtagtaactctggcgactactactaacaataatttttaaaaatcttcaggctggacttggtggctcatgtctgtaatcctgacactttaggaggctgaagcgggaggactgcttgaggccaggagttcaagaccagcctaagccacatagcaagaccctgtctatacaaaaaccaaaatattagttgggtgttgtctgaggcatgagaatcacttgtacccaaaagttcgaggctgtcaccacagttatgattgcaccagtacactctagcctgagtgacagagcaagactctgtcttgaaacaaaatcttcacttggaaatcttctatctcatggtctcatctgatggcccagaaggaattttctgttgttttaatgaagaggaccatgaggtctggagacactactatggtccaagaacagatccctgccccaatatttgtagtggattctttgcagtagacaaaggctgacaggtttatagtttttaatgtacattatgtcaaatacgctaattatatttaaagactctgagtgaagaactcagacaggtgtcagatgccaccctgtgtgacccggggcagacagcatctctgtgccgggccagctgcctcttctgtaaggtgggattttatgagttttttgtcttatggggacttgggaggacagttgaggaaatgcttataaacccaaggacttaactgctagccattcaacaatatttgaggccaggcatggtggctcacgcttgtaatcccaggcagaattgcttggctgggagttcgaggccaacctggccaacaaagtgcataccctcatctccacacacacacaaagatttttttttgagacagagtctcactttgtcacccaggctggagtgcagtggcacgatcttggctcactgcaccctccgcctcccaggtgtaagcaatcctctgcctcagcctcctgaatagctaggattacaggcacccaccaccacgcccagctaatttttttttatatttttagtagagacagggtttcatcatcttggccaggctgatcttgaactcctgacctcatgatccacccacctcggcctcccaaagtgctgggattacaggcatgagccactgtgcccggacaaaaatttttaaaagttagcccggcatggcagagtgcacctgtagtcccagctactcaggaggctgaggtgggaggatcacttcagcccaggagtttgaggctacaatgagctatgatagcaccactgcactccagcctgggtgaaagaatgaaacctgtctaaacgaaaaacaaaaattgagcacctgctgtgtgcctagctctgttctggacacggacacggtgagattacagaagaaaaaaaagcaaatattcccaccttcctggagcaattattgttatacatggctgtgaggcagctataattcattgtttctgtttttctccctccccaaacaattctgtcctaacctgaggctctcttaggaggctctttagtgccctctccccaccccattcataaaatggactccgtggcttttttttccctttttctttttttaaaattttatttaaaaaaccttcggtgcaatattaaaaagcaatacagccagctggagcgacaatcaacagaaagaaaagagggaggagagaaaaggcccgaggaaccccaacccagctagtcccctaggggctggaggccaggggcagactgagaaggggggcatgggtggtaggggagggaggaaagaccacccaccaaaataaacaggcagatccaaacatttatacaggaaacatctggctgaacggaagaggatcttggggagatgagaagccccccacatttcattttttttttcctaaaatgtcctggactgggtggggagggtcagccacctggggtttaaggagcaatcccctccccacaccgacgtgctgaggagcagatgtgtgtgagacagacacaaggggcaaagataaggacaagagggtgccctctccttggaatctgttatgagggctgagggtgtccccgtccagctcctggactctgggggatcttgggtgagatgggggccggaatgggctggggcaggggtgaggctgggcgctcagcctaagaagccatcggggtcatcatcctcaaagtggccttgctgaagcaccttgatgtggtgctcgtagattttcagggctggcccgaggcggatggacaggccggtgagcacatctgtgcgctgcatgagcagcaaagatttgccatcaatttcctgggtgggacaggaacagagagagccgggatcagggcacatcccagggaggccctctgtgtctgtcagtgtgtagtcctgggctggaaactcacctgctcttggaaagctgtcgcctgctccgggaatccagcctcagtaaaatattcgacgacatccatcacggtccactcgacgggatcagatggcttctctttgcgcccgggactgcatcaaaacaaacagacaccagtgaacacggatgtctctctggctgtaccacacacctgagcagcacccccatgtctccaataccccaacttacggacagccaaagggggtcccgtcggccccaggtagggctggtttgcctgggggcaaaggcacgggggacggggagtctggcccggtggcaacagaagctgggaaggaaaaaaacacctgtctttggctttgtcttcgggctgagttcctctccacctagcactcttccccacccagagggatccttacctgttcccccttccttgttcatggctgccatggagaacacctggcgggtgccgctgcccggggctggcccccgcccttcatcctggccctggtgcggtccgcagggggtccactccttgaccctctccttggcactctgaggtccccgctcgccgttaagctggtggtgctgggcacctgcaggacggtcactctcgggcacttcagagccctctgacacatcatcttcttcatcttcatcttcatcatcatcttcttcctcttctttctcaagtactcgctcttctccacctctctggagccgaggagagaagcatgcaaaattagtagctgttctaatcccagaccctgactgtggcgtccgggcggtggggaggaggaaccgattccacctttaagaacaatacggactaacttttacgcattcactccgtgccaggctctgtgttaactaaagccctcgacaaccaaatcttactaaactcgctcaacaaccccaaggggtcgctactgttattaaaccgcgtttacagcggaggaaactgaggctccgggagattcaatcacttgccaaggtcaccacgcaccgagcccgcaggaaacgcgcgcaaagccccagccacccgccacccagttcctcccgggactcgcgcccccgccaccaacttcgcccgcacctgcccaccgcgcggcgcccccgctccccggcgcgctcaccttgctgcgagacgggcgggcgctggcggccggcggcgcccgtccgggcctgtccccgcggggcagcgcaagcgctccgagacgggtgcgctccagacggcctcgagccgccgcctcctcctccagcagcccctgcacgcggccgcgggttaggcgaccgccggcgccgccgctgcccccgaggtagcgcacgacttcccgcaggctcacgggccgcgccgcgccgccggcccgcaccgcgcccccctccggcggcggctgtggctgcggcggcggcggctgctgctgctgtggcggcgccggcggggccggcggggtggctccgcgccggggcggctggacgcgcgccgcgttgcggtacgagatgctccccttgtagctgacccggagcacggcgcgctgctggatcagtttctcgagctcggcgcgcgtgcgctccggctccgggccgtgccgccgccgcaccatccggcagatgcgctccaggtccggccgcgccttgcgcgagcgcagcgagtcgatggtgtccaggatccactcttggtagtgcggggaagcggcggacgacgaggcggcggccgccgtggtggcggccgccgccgtctccggcgggggtagggccgggggccccgccatgcctcccgcccggcccggctgcaccgtgcgcgctgcctccctcccagcgcggcgcccccctccccggctcccctccctccgccgctgcccgcctcctccgcctccccccccggggggcgcagcgcctcggcggagcggcggcggcgctgctgtttctttgcaaaaaaaaaaaaaaaaaaaagagagagagagggagagagagagagaggaaaaaacagtgagagagaaagaaaagagagaaaaaaatatgcacacactcactcactcgcacgcacgcacacacagacccgcttctgctgggcgcgcgcggggccggggatgcgagggggaggaggggagcgcggcgcggccggcccctccccgccgccgccgccgccgcacgcgcgccctgcgcccgggacactccggccccccttccttccctccctccctcctccccgccgcccgccttcctccctcccacccccacgcgcccgcttttaaggtggagcccgggccccccgcccgccccctttaccctgcgctctcgctcactccggctcgctccggcccccccttacaactcccgcgcgctttttaaggaggcgccgcggagttggcccggggcgggggcgggggaaagcggcgggcgggggagggggaggggagtgccggggggagtggagagggggcgggcagggcgggcgggcggcgctcggccgccctccagccattgggcgcgggacccagacgtccccggcgcccagcccccctctccacgcctctccagcgcgctccgctctcgggaccgcacttaccgggaactcgccgcccgcgggccggggctgccgcgctcgcagggtgctgcggggaccctcctgctgccgccgcccccgcgtccctcaggcgcgcctggcccggcgctgaggatgcgggaaggggggcgcgcaccctctcccccttctactccccctgccagggccgcccccgccgccgctcggcctcctggcgcgccagccccagcgcctccctagagcgccctctcggtcccgggctggacgccgagggggcgcgccgcagatttggggaccccgaatctggggtcaaagggcagtttgacgctcgtttctcctgcggggccgaaggagtgccggaatttcagctaaaccctggttacaaggacttcaagccaggacctgatcggcctgcacgctggggtccgaaattccctttccaaccccctgggggtgtgtgggtgggtgatcgaagtcgagaacaccagcgacactttttttttaaacaaaactttattggtaatagttttcaaatatgtttacaacagcacactgttcaagaggaagtctcgtccttcgcagcacacaggttgaatcgcccccgcacccacccggggccccaccccaggcctgagaactcctcctgggatggggagaagttatgagagggggaaatacggggatgaatggggtggctccccagcggctccccacttttctattacgagagaaaaaagcacaaatgagaaagtgggggagaggtgatggacagctgacagctaagctggaggaggggcgcccaggatgggggaggcggaagctggtgggtgagtaaaacaggcagcccctccccagcagctctagccttgaaccccgggccgtggcttggggggacttggcctcttctgttcccttttgcagggatgccctccccactcagctgagggaaggctggacgttaaaatctagcggagaataaaattaaggagttggggggaaacgctgctgggaggaaagacttgggcttggggctccccctctgtctttttgggggatgactcctctttggcagggagaggggcagctgctttgtctggctttcaaagcccaagggtgaagacaggtctgttggggaaaaagagagcggaggcttcctaaaggggcctagaccctcgcaggattggcagagaggattccccggggaggggcccaggggagattagcagcggggaggttcaaaccccagcgcctccctttccaaagtcagtctgcttctctttaaaatggatttgaggaatggggggacatgggaggggtgggagtagaggaaggagggagggaggcactggtggaacttaaataagattttaaattgttgtttttttaaaaaaattctagcaagcaacccactgaacatgtcactaaaaatctctccttcccaggcaggattactccgaaaggaaggttggcgcttcgttcatttgcccttagcaagtggggcctgtggttgggtgggatgggggtgtgggtgggggctggagttaagcgtgagcccctctttccataccctgtccctggatacaccagcaagacctggtctgactggagttgagaaactcgtttaaaacaggcagaagtgggctgggagggctgaggggctggggggctgtggggaaagaggaagggaaaagtgggagagggggcaggagggtgaaggggatgagggggagcagctggtgtttctgtccctctgattatctgggcttcctgctccccctaaccctggagggtggggtgggggtgaaattagatgcaaggaactctggggccctctggctgttcaatccaaccctcccacccccccgaccaaaaaaaagaaaaaagaaaaaagaaaacccatgggggcacaggcatgcccctaaaactcagaaaactccttgccacacttctcattgatggagacccggatttcttcttcctcatagtcgtcaaagttactcgtatccccagggcctttaaactttggtatgaagggagcttccacctggagagggatcaagaatcacccagacctcagcattcaacataatcattattacaacaataaatgcgaatggcctaacattcaagagatatttactctgactcaggcctgtgcttaccattaggttatggattcctcttaacagcccgaaactcttaatgtagcaactcatcaaaggggaaattacttcccagagagaggcatctgttgcacaaggtcatggaatggccaaatgaccccagaatcccatttctagaccccactgctctaagctctctactctaggttgctcctgaacctgtgttctcttctctatttctctattggctgtcctccctgactcttggcctgctcccaaaccctcagcaggcttaaggaggggaggcccaccttcctctggtagatggcaatccagtcagttgtggcaaaccacttgtggttcttgatatcgttgaccccattcttgaggttcccaaagcgcttggtgagatctacctgcaggaggttccgcagcaggtccttcaagtcagagctgaagtgggaagggaagcgcacctggaggaaggggtacaaggacagggtgggaagctggtctggaacttgggaagcccatgatgcttctttctccatccaacggtcctactgggtgtgggcctccaaagcagagtgcctgccagcatcttgtaaaacagctccttgagcctaccctacagtttccaatttaggaagtctgatactgtggcctgagaatctgcatttctttaaaaactttaaaaattcaagagttagttattttaagaagtttttgtagagacagggtctcactacgttgcccaggctggtcttgaacttctaggctcaagcgatcctcctgctttggcctcccaaagtgctaggattataggcgtgagccaccacacccagcaagaatctgcatttctttttttgaaaaaaaaaaaaaaaaaaaaaaaaaaatagcctcactctgtagcccaggctggagtgcagtggtgcgatctgggctcactgcaacctccgcctcctgggttcaaggaattctcctgtctcagcctcctgagtagctgggattacaggctcacgccaagacacctggctaatttttgtatttttagtagagacggggtttcaccatattggtcaggctggtcttgaactcttgaccttaggtgatccacctgccttggcctcccaaagtgttgggattacaggtgtgagccaccgtgcctggcccaagaatctgcatttctaacaaattccccagcaatggtgctgctggaaaggggtcccttttaagaaccattgctctaaggcaagtgctatgatgatttccatttcagagaaggggaaactgaggcttgggttaaacagctcttcctaggtcacattgaggtgtgtgatggggcaattccatctcaggtctactggactctagaacttgcattctcagctgctgctgctgctgcttaaggcatctctgctggggtctggagacttctgaaatattcttgcttatgacaaactttttctctcctctctttctgcatagctaaggctcttccgttctttaaagcccagctcaactcttcttgaaagttttccccaaaccctctgagcccacgccttgtatgcaagtcatcactggagttatagttgcaagaaacgacttcttgttcctgctgtgcctcttacacgctgtgtgaccttggccatggcccttaacctctctgggcctgcgcatgcctctcagatgtggggcagatatgccagggctgcacgagggagataataccactgacggtgcgggggaactagaaaatgctacaaagaagggagtcatgtgcatcttctcctgtgggatcttctgtgtttttttctttcttttttttcccactctgggacatttttttttctttttttcttttttttttttgagatggagtcttgctctgttgcccaggctggagtgcagtggcacaatctcagctcactgcaacctctgcctcccggtttcaagtgattctcctgcctcagactcctgagtagctgggattacaggtgtgtgccaccatatccggctaatttttgtatttttagtagagacggggtttcaccatgttggtcaggctggtcttaaactcctgacctcgtgatccgcccgcctcggcctcccaaagtgctgggattacaggcgtgagccaccacacccggccaactctgggccattttcttggcagtttcttttggtccggtggcagatgcctcatctttccctttttttgagacagagtcttgctctgtcacccaggctgaagtgcagtggcgcaatctcggctcactacaacctctgtctcccgggttcaagcagttctctgcctcagcctcccgagtagctgggattacaggcacccgccaccacgcccagctaatttttgtatttttagtagagacagggtttcaccatgttagccaggctggtcttgaactcctgacctcgtgatccacctgccttggcctcccaaaatgctgggattataggtgtgagccaccgcgcctggccttcatctttctcttttagtgatgctatgtgtccagctggggcaccccacttgcctgaatttttttaaaagacagggtctggctctgtgacccaggctagactgcagtgatgcaatcacagctcacagctcacttctgggctcaagcgatcctcctgcctcaccctcccgatgagctgggaacacaggggtgcaccatcacgcccagctaatttttagttttttttttttttttttttttttgagacagagtcctgccctgttgcccaggctggagtacaatggtgtgatcttggctcactgcaacctccgcctcctgggttcaagtgattctcctgcctcagcctcccaagtagctgggattacaggcgcccaccactatacccagctaattttttttgtgtgtgtttttagtagagacggagtttcaccatgttagtcaggctggtctcgaactcccgacctcaggtgatctgcccgccttggcttcccacagtgctgggattacaggtgtaagccaccgcgcccggccagtttgtttttttttttttttttttagagatggggtctggctatgttgcccaggctggtctggaactcctggcctcaagcctccacttcccaaggtgctggcattacaggtgtgagccattgtacccagccccaaagtttcaaagccagtcggtggcagagctgggactggggcccaggctgagcctgagggtgctcccaccacagtgtcatgactccgggccaaccaaaagctcctgtgtaggagatgctggaccaagtcgggggatggtcgggtcttcccagcaaggtggttgagctgagggcagaggtggggtccccaacctctctccggccatcagtgcctacaatgattgcctacggtgattacctactcaccaaagtgtgatcttggccaagacacatcccttttcccagcctgtttcctcacctctcctacagagggtgccactatctcagggtgtgactgatggggattctggggcctggtggatggtgggcactttgcacctgtcatagatgtgagctgagatggcttcaccacccctcatctgaaccctcagagttaggcaagtctgggtttgggagaggaagcatgggctataaatgctaagtgagggcaatcctgggtgaggctatggacagcacctgggaacaggaaccaaatacattcgtttttctgccttggaatttgcgaaaactcacactaactgggatgaggagcgaaaaggagggtcgtctggcagggcggtttgtgttctgtggccaagatgttcccgtgaggctcgggattttggaagcccatgggattctggaaccgcggggttggggctggacagcaagggggcttgaggtgttggcctcagtgtggccggcgcgtccagcttcaccacctggcctgacttaaggaacttctagattattctgacaacaagcagggctccccagggaataggatgggtgagcagggaacggtctgtttcttccagggctgtgtccccacatccggacctcaccttcccagagacgatcttctcatagatctggatgggctggtctgcgaagaagggcgggtagccagcggccatttcatagataagaacccccagggcccaccagtccacggccttgttgtagccctggagcaagatgggggggcacagggtgaggaggaggcgagagcaggagagcagagccggcctcaggggaaggggagggctggggaggctcctactttgctcaggataatctcaggggccaggtactcaggggtgccgcacaaggtccaagtgcggcccttcacgcgcttggcgaaaccgaagtctgtcacctgtgggcacaagaacaggcagttggcagggaggaagggtccaggccacggcttccccagggctgcccctcgcccggcctggtgggcacctgaatgtagccctgctggtcaatgagcagattctccggcttcaggtccctgtagatgagatccagcgagtgcagatactcaaaggtcaggacgatctgggccgcgtagaaacgggcatggggctcactgatggggacaaatggggaggtgaacgtcagtggtcatgccccaaaatggtccagcaggtggccctgcagagcctaccccagaggaagacacctccagtccagccgtcagaaacgcaaggcacctgattcttagatagcccgacatgggaaacagcctgtgggtccatccacaggaaaatggaatcacagactgagctatagtcatacaatggaattccactcaccaccaccaccgccaacaggacagcccatgcatccactcaacaatgtggctgcatttcaaactgattatgttaagcaaaagaagacacaaaagaacatgaatgattccatttatatcatgtccacgcccagacaaaacaaaggcacggtgtttgaagtcagaaaggacaactgcctttggtggggaggtgacgtgtcaagagagggattcggcccggtgcggtggctcacccctgtaatcccagcattttggggggtcgaggtgggaagatcgcttgagcccaggagttcgagaccagcctgggcaatataggcaagacctcacctctgtatgtatgtagatatgtgtgtgtgtgtgtatatatatatatatatttttttttgattaatttattttttttaagacagtctcgctctcttgcccaggctggagtgcaatggcataatctcggctcactgcaacctttgcctcctggaaacaagtgattctcttgcctcagcctcctgagtagctgggattacaggtgtgcaccaccacgcccggctaatttttatatttttagtagagacggggtttcaccatgttggtcaggctggtctcgaactcctgaccttgtgattcgcccgcctcggcctcccaaagtgctgggattacaggcgtgagccatggcacccggcctccacctctgtatgttattggaaaaaaaaaaaaaaaaaaaagggattcaagggaattttcttaggtgatagaaaagttccatatactgttttgggtggaggttaggtagctatatacaactgtcaaaacttgtagcatggaacattgaagaactgtgcattttgttgtatgtaaagtgaatctatagttatctatctaaaatacaactacaaggccagcgcggtggcccatgcctgtaatcccagcatcttgagaggccaaggcggggggggcggatcacctgaggtcaggagttcgagaccagcctggccaacatggtgaaaccccatctctactaaaaatacaaaaattagccaggcaagggggcatgcacctgtagtcccagctacttgggaggctgagacaagagaatcacttgaacccgggaggcagagtttgcatggagccgagatcgtgccactgcactccagcctgggtgacaagagtgaaactctgtctcaaaaaataaaatcaaataaaactacgtatgtaaacttataagttaataagacaaatttataagttaaaaattttttttttctttcagcagggtctgactgggttacaacccagtctggactgcagcagcgtgatcacggcttatgcagtctttttttttttttgcatatgttgaaccagccttgcatcctagggatgaaggtgggctcatgcagtcttgacctcccagactcaggtgatcttcccacctcagcctccccaggagctgggactacaggaatgtgccaccacacctgactttttttttttttttttgtatttttttgtagagatggggtcttgctatgtaaggctggtctcaaattcctgggctctagcaatctgcccaccttggcctccccaagtgggattatagggcatgagccacagtacccagcctgtatcttaaacttacaaatttctgtatatagatttattttatgtataaaaatatatattaaaatctacacatataaaactgtccacctatataaaataaaataatagtataatttttattttatttttttgagacggagtctcgctctgtcacccaggctggaagtgcagtggcgcgatctcggctcactgcaaactccgcctcccgggttcacgccattctgcctcagcctcccgagtagctgggactataggcgcccgccatcacacccggctaatttttttgtatttttttagtagagacggggtttcaccatgttaaccaggatggtcttgatctcctgacctcgtgatccgcccgcctcggcctcccaaagttctaggattacaggcacgagccactgcgcccagccaattttttttttttaaaagagacaaaacctcactatgcagcccaggctggtctcaaattcttgagctcaaatgatcttctcacctcagcctcaggactagtgggactacagatgcatgccaccttttggggctcaaaaaatgcacaaaatcaacaacttcaatttttttttttgagacggcatgtcactctctcacccaggctggagtacagtggtgtgatcttggctcactgcaacctctgtctcctgggttcaagtgattctcctgcctcagcctcccaagtagctgggattacaggtgcccaccaccatgcccagctcagttttgtatttttagtggagacagggttttgccatgttggccaggctggtctcaaactcctgacctcaggtgatctgcccaccttggcctcccaaagtgctgggattactggtgagaaccaccgtgcctggcagcaacttcagtttggacacctaagttgccctgtttgctctgttttgttttgtggtggttgaaatatcacatattcctcagcagaggggaaacagaaacccacagggtctgggagaccacctgcatgttgaagtatgctggactcctctgcattcccagggggcttggtcgtgcactgccacctgtggacaccctgacagcctgatgtgatggggggtggcccgcttacctgaaccttccgatccgccgtaggtgtgagaacatctccccgccgggcacgtactccatgaccatgtataagtttgagttgtcctgtgggaagcagtggctggtcaagggcccacccctgagacttggacccgatctgaaggccttgggggcctccccggctggtgttcaaacattaaatgacaacagcgatcctggctccctgtaggaatcatgttctacaggggcgacccttatcctgctgttaatgggtgaaagtgagggctggctcagaggtatgtcaggacctggttagcctgccttggctggagagagaactctgtagtaccttgctctgggagcttgagtaaggctctgaggccacagttttgtcatctgtaaaatgggatcatgataggctgcagaattagtggggcccagaataaaaaagatggcccctggttaaaaaattattacagagggtcgggtgtggtggctcatgcctgtataatcccagtactttgggaggccaaggtgggtggatcacttgagcctaggagtttgagaccagcctgggcaacatagtgagaccccgtctctgcaaaaatacaaaaattagctgggcatcatggcgtgcacctgtagtctcatactcaggagactgaggtgggaggattgcttgagcctgggaggcaaaggttgtgagctgtaattgcgccactgcactccagcctgggcaacagggtaagaccttatcttaaacaaaacaaaacaaaatggccgggcacggctcacacctgcaatcccagcactttgggaggtcgaggcaggcagatcacctgaggtcaggagttcaagaccagcctgaccaacatggggaaaccctgtctctactaaaaaatacaaaattagccagatgtgatggcacatgcctgtaatcccagctactcgggaggctgaggcagaagaattgcttgaacccaggagtcagaggttgtggtgagctgagatcgcatcattgcactccagcctgggcaacaacagccaaactctgtctcaataaaaaaaataaaaattaggcttggcacagtggctcatgcctgtaatcccagcactttgggaggccaaggcaggcagatcacttgaggtcaggagttcaagaccagcctgagcaacatggcaaaatcctgtctctactaaaaatacaaacataagctgggcatggtggtgggcacctgtaatccccgctactcaggaggctgaggcaggagaattgcttgaacccaggaggcagaggttgtagtgagccaagattgcgccactgctctccagcctgagcaacagagtgagactctgtctcaacaaaaaaaaattattacggatctcaagacagcagcagcagcaaagcgttaaaccaggtgtggggtccctcggagaacaggcccttgtgcttctctgggtcaaacgtccatgaagctggccctgagtggcctttcctgtttctcatgaccacagctttggatggcacccaaaacggctcccaaagggcgctcaagacgtgcctggaactgtcatgacaaccccaccaggctggaactggtatgatccccattttaccatgagaaagctgaggcttggggagataagtctcttgcccggggccacacatcaagaagtactgaactgggaaatgaaccccggctgcctggggcagagtttgtgctcctgggtcaggctcttaccataaaccaggtgctgcttttgagggatgttactgaggttgggtgactcaccaagggtatcgaactacaaactggctggaccaggaactgaacttgggtctaccagagtcccagcctgactcctgtcccctgatctccctcctccagggatcttgttcttccacaaaagagagcagccactgattgtcctcagctccgaccccagccctgggggccagaaggctgggacccaatgcagtgaccccccgcccttggccactgggaccccaccttgaaggagaactcgagtttgacgaggaacggaaagttgacagcttgcaggatgcgcttttcattcagggtgtgttcgatctgtttcagtttcaccacctgggaagggaaggaggggagggcagaaaggagggggaggtgagaggggcctcatttcccctaatgcctggaactagggatgccggagccaggccggttccttcagccagaatcatttgtgtgcctgtggcctgtcgggcccttagctgatgctgaggacacagcatcagggaggctaggggctgcttgtccttgcacggcactaagtccagggcaaagaatacatgggttacccccacagaggtcagagccgtggtggagggtatcttggggttgtggagaagcagcccccaagaagcccatgtaaagtacctggcgtggtctggggaagggggaatcagacagcgctttctggaggaaggggcagctgaactgaaattgaaaagacaggcaggagaagcccaagaggtggggggtttaggacctgccttacccttgtctagaacactccacacagcaacctgaacctcaggctaacagctcctcagccatcagctgtcccctaatagcagatgccatgagcaggcacctggcacccagtctctcactgaatcaggatagaagccctagaggcccatgctgggagtacgccagtttggaagaccagacacagaggggaggtgacttgtccaaggtcacacagctggctgatgtcaggctggtgtgtaacatgtggccagcctggtccctcagtcagctgtcaactgctttgctcacatagctgtgtcctcagagtctatacctgccctacccagttcagtccccattagccacagggggatgctgggcccttgaaatatggctggtcggatggggagccaaattcaaaaattttaagtatctaaaatataaattaaaaaactgacaccagctgggcatggtggctcacgcccgtaatcccagcactttgggaggcccaggcaggtaaatcgcttgagcccaggagtttgagactagcctgggcaatgtagcgagaccccatctctacaaacaacaacaaggacaacaaaagcaattagctgggcatggcacgactatggtcccagcagctccagaggctgaggtgggaggatcatttgagcccaactgcacttcagcctgggcaacagagcaagaccctgtctcaaaaacaaaacaaccaggccgggtacggtggctcacgcctgtaatcccagcactttgagaggccgaggcaggtggatcacgaggtcaggagatcgagaccatcctggctaacatggtgaaaccccgtctctactaaaaacacaaaaaattagccgggtgtggtggcgggcgcctgtagtccctgctactcgggaggctgaggcaggagaatggcatgaacccgggaggtggagctggcagtgagctgagatcacaccactgcagtccagcctgggtggcagagcgagactccgtctcaaaaaaaaaaaaaaaaaaacaacaaccagccaggccaaaatggtgaaaccctgtctctactaaaaatatttaaaaactggccaggtgtggtggctcacgcctgtaatcccagcactttgggaggccgaggccggtggattacaaggtcaggagatggagaccatcctggctaacacggtgaaaccccatctctactaaaaatacaaaaaattagccaggcgtggtggtgggcgcctgtagtcccagctactcaggaggctgaggcagaagaatggcgtgaacccgggaggcagaggttgcagtgagccaagatcgtgccactgcactccagcctgagcgacagagcgagactccatctcaaaaaaaaaaaaaaaaaaaattaaaaaattagctgggcgtggtagccggcgcctgtaattccagctactcaggaggctggagcacaagaatcgcttgaaacccggaggcagaggttgtagtgagctgagatcatgccattgcactccagcctgggcaacaagagcgaaactccatctcaaaaacaaaacaaaacaaaacaaaacaaaaattaaactcttgatgcaggtactggtgactttcaggcatggttggaacaacttgggcatgtgaatctgctttttcaacttccctgctttttcttatctttccaggaaaaatttaccatcagagttgagaactgttgtaagcatacaatagacactggattttaaagatacttcagtacagaaaaaaaggaaatatttccgaagtcatggaggactgggaaaaaaacaaaaggaatgtaaaatgtttcattaatgatattttcacattgataatatatggaaagggtaatactgtagatatactggcttaattaaaacatatcattaggccaggtgtggtggctcacatctgtaatcccagcactttggaaggctgaggcgggcggattacctgaggtcaggagttcgagaccaacctgaccaacatggtgaaaccccaagtctactaaaaatacaaaagttagctgggcgtggtggtggcacccataatcccagctacttgggaagctgaggcaggagaatcacttgaacctgggaggtggaggttgcagtgagctgagatcacgccactgcagtccagcctgggcgacaagagtgagactctgtctcaaaaaaaaaaaaacataaaaaaaagccccaaacatgtcattaaaatgaatttcatgaatgacacctgtttctttcattttctcttttaattacaaactttgggtgtttttttagagatggggtctggctgtgttgtcgaggctggagttgaactcctgggttcaagtgatcctcccacctcagcctgtctagtagctgggactacaggcgtgcgccaccgtgcttggctgtttttactgtttatgatggagcaaacagaaaatttaaaattgcttctgtggctcaggttacatttctgctagttacattgctgctttatagcagtgcctggtataaagtccgatcacaaaaatatttacgggaagaaagtgcacataaacaccacttcccccaagagtgctcttgttctcctcctgttgggctggtgtctgaccctgtgtcacagtgcctggctttgaatccatggccggcctggagagggagctttgggaaggcggcacagggcccttctgacccctggggctggcacattatgggggctcggggaatagtgggtgagcctggcatggtggctcatgcctgtaatccctgtgctttgggaggctgaagtaggagatcacttgaggccaggagttcaagaccagcctgggcaacacagcaagaccccctgtctaaaacaaaaaacaaacaaacaacaaaaaaaaattagccaggcatggtagtgtgcgcttgtagtcccagctactcaggaggatctcttgagctcaggagtttgaggctacagtgagctatgatcacgtcactgcactttcctgcttgggcaacagagcaggatcctgtcccccacaaaaaaaccaagcggccaggcgcggtggctcacgcctgtaatcccagcactttgggaggctgaggcaggtgtatcacctgaggtcaggaattcgaaaccatcctggccaacatggcgaaaacccatctctactaaaaatacaaaaattagctgggtgtggtggcaggcgcctgtaatcccagctactcgggaggctgaggcaggagaatcgcttgaactagggaggtggaggttgcagtgagccgagatcacgccactgtactccagcctgagcgacagagcgagactctgaatcaaaaaaaagcaagtgagtgaacgggtggatagggcactctaaggagtgggcacagtccaggcaaaggcctgacaggcaggccctgagcgaggacaggccacctcaccttctgtttgtcgaggatcttcatggcatagtggttcccggtctccttgtgtttcaccagcatcacccgcccgaaggagcccgtgccgagggtcttgattcgttcaaactgatccaagtgggctgtgttctgtgggcagaggggtcggtaggctcagggcacgccctccccgcggcctgcttggctaaggtctggggcatcccctctgccaccggcagagggggccccggggagcacgtggggtcagcggggtgaggacagggggcggaaaatcaagatggcagagggcacattccttaaggcgggtggcaggggccagatccggccctggcctggggcctggaagctgctggcagctgtgctgggggcaggggcgggccgttgggaggggtggtgggatgggggtgcctggcattgggcagtcaggtgtctccacacaggagcccccatgggcacctagggagcaaatggggagggtctgaagccttctatggggtttctgaaattctagctgtgttgctgggacacagccaggggctgggggttagcagctcacccctccctgggctctgcacccggcagccttacctgagcgggactttcccattttttaagaaaatcttctttggctttggctaagaattctttcactgaaagggagagaggggagagttatacagagacgcccgtctcaccggggtgggttcaggtgatttctggggagatacttggtggaaagtggggtgcagttccaacccagagcctgacctttttctggtgcctctggggccttggctgggccgtggcctgggcctcccttgctacagagaggtgggatccagctgccactccatccaaagtggggtacagagagtctcaggggtcactcgcaggggaacggagggaggtgcccaggcagaccagcccacccccactcgccccagttctgaccgacattccatggccagggccgacgccagccgaggtatttatagccttgggatttggctgttcctctggccccttctctggggaggccgggcctgggatggaggcctcgggggctcgggtagcaggtgcccttggggggctcagctgtcaccttggcccccagctggccctgttcctctccgtggcaatcgcaagggcattgctccagagctggttcaagggaagtctcgcccgatgcccactcctcggccccatggtatcccaaggtgaacatcaccgcctggctaatgttgaaacttccccggcagaccctgtgccggctgctgtctacactgtctcatctgactcactcggcaacctgccttgtatccattgtctccacttaacaacccaggaaacaggcttgaaaacagtcattctcgtctctgctgagacacagcccagcaaagtggctaagggccaggacttggggtcaagatccagttcagagcccagcctggtctctgatgaactctgtgactttgggtaactgatctcacctctctaggcctcagttttcctcatctgtaaagtggggtggttttgaggaatgaatgagttcatcttgacaaagggagttgaacagtggccccgtgtgatgatagtgccagataaatgtcagctattattattttttatttatctatctattgactgattgattgattgattgattgagacggagtctccctctgtcgcccaggctggaatgcagtggcgcaatctccgctcactgcaagctccgcctcccgtgctcacgccattctcctgcctcagcctcctgagtagctgggactacagacgcctgccaccacgcccagagaattttttgtattttttttagtggagacggggtttcaccgtgttagccaggatggtctcgatctcctgacctcgtgatccacccgcctcggcctcccaaagtgctgggattacaggcgtgagccaccatgcccggccaatttattttttttaattattattatttttttttttgagatggagtcccactttgttgcccaggctggagtgcagtggcacaatctcagctcactgcaacctccgcctcccaggttcagatgattctcctgcctcagcctcctgagtagctgggattacagacacctgccaccacgcccagctaattttggtatgtttagtagagacagggttttgccatgttggctaggctggtctcgaactcctgacctcaggtgatctgcccaccttggcctcccaaagtgctgggattacaggcatgagccaccgtgcccagcctattattttctaaattgaggtataaaatatggggagagaggctgggtgaggtggctgacgtctgtaatcccagcactctgggaggccaaggtgggtggatcacaaggtcaggagttcgagaccagcctggccaacatggcgaaaccccatctctactaaaaataaaaaaatgaggccaggcacggtgggtcacacctataatcccagcactttgggaggccaaggcgggtagatcacttgaggtcaggagttcaagaccagcgtggtcaacatggtaaaaccccgtttctactaaaagtacaaaaaaatcagccgggcatggtggcaggagaatcgcttcgacccgggaggcagaagttgcagtgagctgagatcatgccattgcactccagcctaggcgacggggcgagactctgtctccaaaacaaaacaaaaaaattagccaggcgtggtggtgatgtgtgcctgtaatcctagctacctgggaggctgaggcaggagaattgcttgaatccgggagactgaggttgcagtgagccgagattgcaccactgcactccagcctgggtgacagagcaagactcgtctaagaaaaaaaaaagaaaaaagaaaagaaaatatggggagcgatcgggcatggtggctcacgtctataatcccagcactttgggaggccgaggcaggcagatcacttgaggtcaggagtttgaaaccagcctggccaacatggtgaaaccccgtctctactaaaaatacaaaaattagctgggcacggtggcgcatgcctgtaatcccagctatttgggaggctggggcaggaaaatctcttgaacttgggaggcagaggttacagtgagctgagatcatgccactgcactccagcctaggcgacagagtgagactctgtctcaaaaaaaaaaaaaaaaaaaaaaaaaaaaatatatatatatatatatatatatatatatatatacacacacacacacacacacatagggagagccgggaacggtggctcatgcctgtaatcccagtgctttagaaggccgaggttggaggatcgcttgaggcctggaattagagaccagccttggcaacatagcaagacccaatctctacaaaaaataaaacaattaaaaaattagctgagcatagtggcccatgcccgcagtttcagctaagcaggaggctgaggcaggaagattgcttaaagcccaggagattgaggttgcagtgagctatgatcacaccactacactccagcctgagcaagagtgagactctttctcaaaaaaataataatactctgggaggccgagttggggggattgcttgaatacaggaattcgagaccagcctggacaacatcaaaaccctctacaaaaaataaaaacattagccaggtgtggtggtatgcacctgtagtcccagctactcaggaggcagaggtgggaggattgttcaagcccgggacatagagcctgcagtgagccgtgactgagccattacactgcaggctgggtgacagagtgaggccctgtctcaaaaaaaaaagtaataataaaaaaaccccaaaaacaaatataggagatacactgagtgctcaaatcttaaatgcgcagcctgacagattcttgcattatggacttgtccttttaaccaccacctagggctacaagggaccagccccttgctgagtattttctatgcttcgttctcaccctgtggggtgggagctgctgttattcccactgtacagaggagaagactgatcaggtctgaggtcacttgcctgcccccacatcccatgagattaactacttcactgccaactcagccattggtttcagtgctgagtccagtgcaccagggtggccaatgtggacagagctgccttcaaccccctgatgttcctgggtttgctgccaccgaggggccctgtacacttgccctttggcattgctggttatctgcctgccagtaatcccacatggccttgtggggagccacccccactacctgtctccagagctttccctcagcattcagagagaagagccctcatggagctagaaagtggtagatggtggctgggtgcagtggctcacgcctgtaatcccagcactttgggaggctgagacaggcagatcacctgaggttgggagtttgagaccagcctgaccaacatggagaaaccctgtctctactaaaaatacaaaattagctgggcgtggtggcacatgcctgtaatcccagctactcaggaggctgaggcaggagaattgcttgaacccgggaggcagaggttgcagtgggctcagatcgcgccattgcactccagcctggacaacaagagtgaaactctgtctcaaaaaaaaaaaaaagaaagtggtagatggcagatggagagagaccgtggccaagaaggccccacaataaatgaccaggcggagaggggataggcaatgaatggccaggagtcctagatgggtgcctggctgggccaccaactagcccaggggcctgagcctgggggtcacaccaaatccaacactttcactagcagaacctttgtttgagtgttttattttgttttgagatggggtcttgctatgttgcccaggctggtctccaacttctggcctcaatggattcccccaccttagtctcccaaagtgctgggattacgggcatgagccactgtgcctggcttcagtcatagaacctttgtgacagaaaacatcttccttggaaacctccaaataatccacacagaattcagcagtgggtggggagggtggagggtgccctcttgggattctaccttcacccacacaagaaggcagagaggtgccaggcttgaagggaatccaaaaggtctggtccgttttccctttgctcttagcaaaaaggaaagaattgctgaatcctgcacctccccgactcgctgagctcccagcccctggctgtccgctggtgccccacagagtcgctccacagggtgccttgctgttagcatggcccttctctggcctctcaaaggaccagagcgcccaggctctgtcccctctggtgccactagccctgttagcttgtcagatttggggatggggcatgggggaggccagtgccaggaggagcaggcagagagagggatgatgggggggaggggcaggtaacctcaatcaagaggccccacactcacctctgcttcctgtctcttccaggaaagggtagaataaagggtgggtgggatggggtgatctggcggccttctgccccctggccagggaggctcagggtgctggctgtggcttaggcccccggaaggtgcggtgcaggtagcccaggaaacgtacagccaggtgggcccagaggagcagctgcagccacagctggaaggtggtctccaagtccccaccctggctgctgcctgatcccagatccatccccagcccccttgggctctccctggaatcttccttttgctgagaaaccaggaaaacgcagagcctctaagtcagcttccttgggatggcctcaggggaccagggaggaggagctggttgccacagaagcttttaaaggtacctgctccaagctagccaaggtttgcagagggctcccttggcaggaggcaatgggaagattctcccgagggtgtccctctggctggcctgcgtgccccagggcggggcgataaaactaacttccctttccacggacttcactgctcccaggacgccaggccctgccttcctcagtgggcactggactgtgcagaggacagcgcctgatgtgcccagagcagtgcccactgggcagaggggaaagagttaaggttcaggatcaggcaacagccagagactccttaggggctaaagaggccccagagctcccttaattcgctgaaagaacagctggagagaaaggcttggggcggggggcgacaagagccaccctgcctcctcccctgaactccctttcaatgtggaacccccaaatcctgctatcctgagagagaaaatgggtatatctgactcttttgttttgctcctatgcgggggtggagaggggaaaggcatcccgggatgtccttggcctctctcaaaccttgccctgtgcttggctctactctcggccatgaaagtccaaaccggaaacgagcggctaaacccaggggtgggggagggggaggcagccttgaccatcttcctccttctttccagatcccaaaagaagcagagggtcagtggcagcctctttgagtgtgcccggcatccaggacccctgctagcaacaggaagtggcagaggatggtaacccagccagctgctggcctgtacagcctgccgccctgcccacatctcccacacggggggtgccagctctcactctggtccagattccatttgggttcatagggaaaactccttgacaccccttgaaaagccaggaccacagcagaaagcagaaatctagaaactcgccctgggaatggggaattgcaacagcagaatatcaatttgggcaaggggcttggggtctctctcggaaggagcccagccacagaacccccttcctccggacaacaatctcagaccttctgcccttttgaaatctggctgtcctgggaattctggggcaggaatgcccagcctgggctgggccccctactcgaggctggctgattcctccagtggagcctggattccctgctctgggcttacctaaatgacacaactctgagctggaccccaacactggctggaacgacccccattctgagctggaccccaacactgggatggctcatcctacagtctgagctgaaccccaacactgggatggaccactccaccacccctctctgagctggccccctgccgggtggaccatcctcccttgtctgaactgggccaccgatcccctctctcttccccaggccgcacagcccggggctgtacaggaggcgtttccagggccagccaggggttcacatccttcttctcttcgcctgtgccccagaccccgctgcagcccctccctgacttaaggggcagagtgtgcctaggaagttgctatagtaacaggactcagcctcaccatcgctggagttggaagccatcactcagtcctgttctcagggcaccggcactacggtggctgggaaggctcatgagacctgccgtgtctgttcggctgtctgtccccagaaccctgcctgcagggggagctagggagccgtggggtgggagcaggaagagaaacccaacccagaggccactgggtgtggaggagggacagatagggccctccgagtttctgtagacgcggttgcgctaaggggagagctgccttgataagacctcttgggcacccatacaactgccaaggcacagaaggtgtttggccgtcttaggcatccataggatgttacacggcactagttcttcccatctagggtcttcttggggggtgcttttctctctttgccaggatctgcttgtgtcctggggatcgggggctcccttttactagctctgccccttcccctgtgggccagctcccaggggtatcttcagccagtgccagccacgacctgagccccacttggctgtctgacctgggcgcctgccccctggggccgctgctccctctccattcttccaacttggccagagcctgggccttagtcttttttcttggccctctcagctctcccaatggctttgccatctttgggtgtagattcccccaactccactccagggttcattctggatccctggcctcttgggaggaggcggactctgtcctgccctggcacagagatggtaccacaggggactgcaggatgcttaactggtgcctcccaaggcctgggcattttcctgaccccagtcgggccggcgtctggcagatgaaatccaggtgccccctgcaggctggcctggctactgcccctgcccctgccccacccttctaagagggcaaattttgtctaactccatcctctcagaatcagagcgcctcaaagcaaagagggacttccttcctcatcttatttccttctctgggagcctctgggaggaagtacagcttcgggcgtttctcaacgtgtgacatagtcccattggcagaacatgacatgattttcgggatgtttcatttatctagttacactgtatttaatgcgtatcagagaaaatataactggcatggcaatcccatgatttcatttatattattgtttagaatgagctccaagtttacatctgaacacaagtgagtaaaacttttattattttaaattaagaaaatatgatagagtaaaaatctgggaggctgctgaaaaatgtcaaagtcggggaattctggggtccaagaagtttgctggtagatggatctggatgtgaatcctgcctctgtgacatcatctatgtcatggatgtcatttctaccagagggctcctttggaaaatttggataacagcccgttatgaaagtcaccagagtaggtatctctatccgcctggccatttagcctgtggcacagcctagatgcccaataaatagtagctctattttaccatgatcattcattcctgggtgtctgacctgtgctctgagagaatcagtggttccttccagagcctctgatctttttcttgggatcctttttcttgtgtggctttccaccccccaccacatgtgtctgatagccttgaaggttttccaggactgtcatctccccaactttcaactgagctaccgcaatatatagctgcctgcctctaccttccacctcccagctggcctcacctgctgggggcctgactcctccccccccggccaagtcccctccaagctcatgcccagaccttttttggacactacccacctgctcctctgtcatcaggcactcagctacaggcatttccctccccagcccccacccattggtgacatgtcaggcctcttcatgatcgctctgtgactctgagttctgctatttgaatccgtatgggaataaagttccctggctttcatacctttctgggagggggcattcaggaaactcagatgctggggtttgagaccaaaaactggccttccttttcgaccaatagttccgactatttctgggtaagtggacaggggatcccagctgccttccagctttcagactggagtgacaacaatttaagagctgtaaaaattgggaatggggttcaagaccatttctgatggtatttccagatagagaatctctttctctggctggctggaaaagaccaacctaatgtgtgggcaagtgggtgaaacaggtctctctctggctgagccctgggaatgatcagaatcactagacgtcaaagcaaatcactagacgtcacccattactctctttgactgcctcctcctccccagtgctctttctgaccatctcagttagaaccgaatgaacctcgctaaacccagacacttttcatcccaagccaggagtggtggaagaagccccagggactgggtgaatgacggagcctcagttgtgaaacgaccatttattgaggggccctccatggagcctagagctcactgcaagacaggaaatgagagggggctctgccaccacccccttaccccaacgcaggaaagaggatgcaatgaatcccaacaagaccagctcaaacttggctttggaagcactgaagcaattctctacgttcataaacagtctgctaccccagccagggacagacgcttgcttggaggacggagcacaagcagagcagcagaatgacagagtgacaggatgagagaggcagagggacccagaaagatcctgtcccccatgccaagtgacacagaagaaaaaaataatgctggaggtggctctgggaaatgttcagggggcaggatgggtttggaagggggggctgtgctaaggtgaagagggaaagggcaggagaaagatggcgggggctggaggggggaggggtgtggtcagcaagtggccaaggtccctgcgcggtggaggcagacagacctcatcgcattcccaaactggtagaaacctgggtcggggtcaggcagaggatcccataggtgagagaggtgagtgaggaagtggggggattagaatctgggaagaggggccaggaaaggagggggtaggctggtgacaggggcccatgtggggccccagcggtcatacgtgccatggttggcagtgacagctgggggggagcacggtctttgcagcatggggcggccctaggggaaggggacccctacagggggtactctgcgggcccgcgggccccagccttggacaggccggggcaaggggcgctggggggtaggcagagaggatgaggggccccgtagggggaggggccaggcgatgatggacaaggccagggctggcagcgcagggccaagatcggggtcacagcccgggcactcaccgctctcctgctcgctgcccttcttggcggcggcggcgttgcccatcgcggcggcggcggccggggccggtcccggagctgcggcgcggcgggtgctggctgcggccggcggccccggagcgcgctgggcggcggcggcggcggccctcgggctggctgcgctagctgcggcgccgcgacccccgcccagcccctgcttcccgcgtctctccgcgcccgcccgcccgggaacctcagcccaagatctctgccgctgtctgtgacgcccccgcagcccgccgctcattggcctaggccgccctgactgacggctcagcgccgcctcccattggccctcccgcgaccttcccgcgccactataggctctcagcctcgggacacgcaccgcggactctcggccattcactcgctcgcgaggccgcagctgggcgggcagacgcgtccgattggccgagacgctggactgggcccggggtccgccctgcgaggccgccgattggcggaggtgccgggtccgccaagccccccagcagaacgctcagtgtcaatccgggggtgagagggcggggcggagacgcagtctgcgggcccgggccggcggggcggggcggcggaggctggctggcggccgcgcagcgctccgaggctcaggaggcggccccggcgggcgcccggccggccccgcgcgcgccgcagtcccccgcccccgctcagtgcggcagcggctgtcggccagccggagttggcgccgcggcctgcccggcgcagccgctgtccacctgccagcgggggaggggcgcggccggcgcgcgggtcagaggtcgcccggccgccgccggcgtcattcataaggcctggcgctgggcggccgaggccaggcctgcttgggggccaggccgcggggcctcctgggttttcccagccgcactcaggaggatgccgggcccggcgcaaggggtggctgggaaggggcgctcagtgtccacccctttgctgggccctagccctgggctcctgccagtagtaagagctggcacccacttaacgctccttcgcaccacactcccatcgcgtaggtgctaccatcatcactcccattgcacagatgaggaatctggggtacagccaggcagattccctgctcctgttccccgtctgtatttcctgtctgggcaatgcgaagggaacctgccccttccttcaggatcctctttcagtacacacttagcagaggacagtcggggtttcccaactgcgacactactgacggtgaggctggatcattttctgctggggggtgtcttgtgcaccactgggtgttgagcaacatcccccgcctctacccactggatgccagtagcccctcctctatcttcctgctggctgtggcaaccgctgtctcctgacattggtgaatgtgctcttgcggggccgaactgctcctgattgagaagcacttaagagagggtcaggggaggggagaagccaggtcaccccgactcggaagggctagctgggcttaactacaagccgatctgctgcttcgacttgaatagcctccaccttctccagctgctgtctgcccccatgttcccagatcaaccacagttccagggagggagagtcagagcctttctgtgaactatggggaaatggctgaccactccgcctctggatggatagatacatggtaaggtttagtaaaatttaataaaagcattgctgtttgtgtgttgggatcacgatgttaatttcctgtgggtcaagggcaaagtctgaaaaatcactcattataatctatctgcaggacagctggtttaagttttgacaaagaaaaacccctcctggaacctcagtctggaatacaactgtagaaccaattaagactggagtaggaagctggaaagaagacgtgggacagccaacccactggacagggcaagaggccacttctgggggagagtggacaaagttgcttcagtccaccagagacaaaagcacaaacaatcattctaaatgaagtgcttttaattttcagaccaaacatttttaatataaaaacattttgataatatacaaacagcaatcacaacagcatccacatggcagcaaggggaccagggcacagagagggggagcgggctggggagggacagttttcagggtcccagttgcttccctggcttgaaatcaccctggtcctagcagaggacaggttaaggctgccagaggcagagggtccctgaccctggcccggagacagactgcccaggcaggccctctgataccatcttccaaccatggcagcctccaggaaaagccagatccatttaggagataacaggaaggtggctgtgattgacaggaaaggcaacatggttcctcagcatcctgctgatcacacctctgggaggggctgctggattgaagaggacctaagaatcttcctgggagcaggacagaaatgggatctaagtctacctactaactaacattcccgcctgtgacaccagaaagctggagtgggtctgctcagatgtacaggaagagaaaggaatgacaaagcctttggctcagcaggactggagccttgacaggcactgaccaagaaagcctctaggtgggccagggaggtctgtgggaaagctttggatcaatggtactcaagggtgcacagtggcacagtggccttagttagaatttatgaagacgaaaagaacacaagtcagaatttagaactgaagtacctgcttcttataggcctgtagaggaaaagcgagatcatccttctggccaggactaggggagacccaaggcctgttctttcctaggggctgagtttgacagacctggattgcagctgatggcccccaaagtcctctagatgggccctgcaggactcgctgggaggcctggttgcccctcccggcgtgctgggacactctgggttcctgcagttagatgcagtccatggagttctcagggaggaggccagggatgcagccagggagccccaagcccttgataggagtgcagttgagtgggaggccgcagcccagggaggggtcctgggtctctatggcctccagcctgtccatgttgttgtcccagttgatatggaagcgggtcacccgggggttcgaggccaagatgttccgctggagctggggcaggaagaggaacgtcaacccttgtaggtacgccctctccttggtcccatagagccaggacacccccaatcacccatctcaagcccagcaagagcaacctacatatggaactccagaaaacacctgtggccaggaccttatttatttatttatttatttattttttgagacggagttttgcttttgttgcccaggctggagtgcaatgctgtgatctcgtctcactgcaacctctgccttccgggttcaagcgattctcttgcctcagcctcctgtgtagctgggactacaggtgcaaggcaccatacctggctcattttcgtatttttagtagagacgggctttcaccatgttggccaggctggtctcaaactcctgacctcaggtgatcctacagcctcggcctcccaaagtgctgggattacaacgcgtgagccactgtgcctggcccaggactttttttttttaagggacagtctcactctgttggtcaggctggaatgcagtggcacgatctgagctcactgcagcctcaaactcctgggctcaagcgatcctcccacctcagcctccagagtagagcacaccacccatgtctggctcatttttttttttttttttttttgcgggggttagggacagggtctcactatgttgcccaggctggcctaatcttaattctctaagacatgcctttgagagacaaaggtctttttctcctcttctaacacagtactgtaagaactgaatattacttgaaaaccttaagaagtgaccttgactctcaatttgaatggctgaactccccccaagtataaagaacggccttgtgggaagcaggaagtggaaacaggccccacctgggagaaatctggcttcatgggcgggttctcacgcagctcagggttgaggtactcgttgttgacgtagtagcccactcggatgaactcctgtccatggtaggtgcaggtgatgaggaccacagtcacacccacggcatcagtctctgggatgagggatgggttgggggcgtcggcctaggggagacacatcctaggccttagcagtgccacagccatgcctcgatgtcattagtacaaagattcccaagcatcatgtatttactgagcaaaaagtatgctctctgccctcagttttcttttttttacttctgcctctcgggttcaaacaattctgcctcagcatcccaggcagctgggactacaggcacacaccaccacacccggctaacttttttttttttttggtatttttttttaatggagttttgctctgttgcccaggctgaagtgcaatggtgcgatctcggctcactgcaacctccgcctcacgggttcaagcgattctcctgcctcagcctcccgagtagctgggattacaggtgcccaccaccatgcccggctaatttttgtatttttagtagagatggggtttcgccatgttggccaggctggtctcgaactcctgacctcaggtgatccacccgtcttggactcctaaagtgttgggattacaggtgtgagccactgcgcccagccttttttttgtatttttagtacagacgggatttcaccatgttggccaggctggtcttaaactcctgacttcaggtgatctgcccacctcggcctcccaaagtgttgggattacaggtgtgagccattgcgcctggactttttttttttttacacagggtctggcctccctctgttacccaggctggagtgcaatggcgccatcatggctcactgcatccttgaactcctgggctcaagcaatcctcctgcttcagcctcccaaatagctgggacaacggtgtgtgccaacatgtctagccaattattttttgtagagacagggtttctccatgttgcccaggctggtctcaaactcctgggctcaagcgatcctctcacctcagcctcccaaagggctgggattacaggtgtgagtcactgtgcccagccaggagttgtcaactgatggaaacacagaatcaatcccacaaatgactacaaaacgttgactgtggcagggagaggtgcgtggtactctggaggagtgtggtgagccgggggacagtggcatgaagctgaacaggtgaggcaggtggtatcaggccacccgggggccagctaagggattgggaaagggcaagagagtaagcaggaggttaagtgccacatcactcttgtgatctgaaaagaagcctctggcaaagtgtggagccgtgacaggagactgtagtggagcagaaggcttacaccagtcatcctggagaggcagtggacttggcttagaccaggcagtaaagaacagattcagggtgtactactgcaaacaagaccagccacgtaattggtgcaaaataaaaccaatgcaaaatgaaaacaccacgcccctccagaaaagctattaggtttcagacggtgacagcagagtatcgcaccaagtgtggggtcctgtgcagctgcctgggttgcacacccaggaggccagtcctgactgttgagtagatagggcctgtcagtggatttagtagtggtggctgaaggggttagataggatgtggtagcttggattagggcggtaacagcagtgatggaggtaagggagtgtatccgagcagaggatcctgaaaaatcacctggagaactcagaatctccatttgttttttctttcttctttttttttttttttttttttgagatggagtctcactgtcacccaggctggagtgcagtggcgtgatctcggctcactgcaagctccgcctcccaggttcacgccattctcctgcctcagcctcctgagtagctgagactacaggtgcccgccaccaggcctggctaatttcttgtattttttagtagagatggggcttcaccatgttagccaagatggtctcaatctcctgaccttgtgatccgcccaccttggccttccaaagtgctgggattacaggcgtgagccactgcaccggccttctttttttaaagagatagcttttccctctgtcatccagactggagtgcagtggtgcaatcacagatcactgtaaactcctggaactcctgggctcaagcgagcctatttttttttttttttttttttagagacagggtctcactctgttgcccaggctcgagtgcagtggcgcaatctcagctcactgtaacttccgccccctggattcaaataattctcgtgcctcagcctcccgagtagctaggataacaaatgtgcaccaccacatccagctaatttttgtattttttagtagagacagggtttcaccatgttggccaggctagtctttaactcctgaccccaagtgatctgcctgccccagcctcccaaagtgttgagattacaggtgtgagccatggcacctggcctcaagtgagtcttctgcttcagcctccctagtagctggcactacaggcctgcatcactatgcctggttaatgttttttttgtagagacaggtctcgctgtcacccagaatgcagtgcagaggtgcaatcatagctcgctgtagcctcaaactctcaggctcaagcaagcctcctgcttcagcctcccaagtagctgggacgacaggtgcaagccaccacacccggctaatttttctattttttgtagagatgggggtctcgctatgtggcccaggctagtctggaactcctggccttaagcagtcctcccgcctctgcctcccaaagtgctggaagccaccacacccggccagaatctacatttgacaacccaggtggggtgctgcatgagagccatttaggagttacagtccatcctcattattcatgggttccatatgtgcaagttcacctacctgctaagtttatttgtaaccccaagatgaacacctgcttgctttcacagtcacttgcagacatgcacagagcagggaaaaactggagttacctaccatgcctgttcccacctagagttacctaccacgcctgttcccacctgaggtcaaacaaggcaacactctgtcttctggtctcagctctcactgtgaatgagcgtcctttcctcagcctacttagtgcttttttccatgttttgtgctttttgttggtgagtttgctgtctatgatggcacccaacggtagtgctgaagtgcagtgtaggatacaagaaaggctttatggaaaatatgcgtattagagaagtttcattcaggagagttatagtgctgttggctgtgaattcaacataaatgaaccactgtatatattaaataaggtatctttcctttttttctgagacagagtatcgctgtatcacccaggctagagtgcactggtgcgatctcagctcactgcaatctccatctcccaggttcaagcgattctcccgccgcagcctcccgagtagctgggattacaggcatgcgccaccacacctggctgatttttgtatttttagtagagacggggtttcatcacattggccaggctggtcttgaactcctgacctcaggcgatccacccacctcagcctcccaaagtgctgggattacaggtttgagccatcatagccgtcctggtgtcttttcaacataaacacacatacaagtttacgtattaaccagctgacgaaaatgtgacttccaagaatctaaccctgtatttcccctggggcaatggttcagtattcactaattcagtgttcgcggcaactttatagaacgtaactcttgtaaataatgggaattgcctgtaaatcagtggcagctttgacacagaggtgggggaagggagggcctgacggcctctgagaggtcagatagttcctgacagtagaactaggatttgaacctgaacttttaaattgttttaattgattgattgagactgggtcttactgttgcccaggctggagtgcagtggtgtggtcttggctcattgtagcttccatctcccaggctcaagtgatcctcccatttcagcctcccaagtatctgagactacaggcgcacaccaccatgctctgctgatttttacattttttgtagagatgcggtctcactatattgccccagctggtctcaaactcctggcctcaagcaatcctcccacctcggcctcccaaagtgctgggattacaggtgtgagcaactgtgcccggcctctatgtttttaatacttgtttttttcttttttagagacagggtctcactgtgttgcctaggctggagtgcagtggctcactgcagcctcagactcccgggctcaagcaatcctctcacctcagtccctggagtagctgggtctataggcgtgagcccgtgcccagctgaacttgaacttttgattcctgaagcactctgtgggatttcaggtaaaagaggatgtttctaggaatcaagggctaaggcctaaggcctcatctttcttacctgaaagacaaacatgtgtctccctgctggcacagggcccaccagcaccgagtctaggatctgatcaaattcctcactctcagccgagccaacataaatgatcttccactccaggtctgcaaagatataggagggttaactaattgaaatagctcaacagcaagaaggcagggataggctcttgtatttttttttttttttgagatggagtctcgttctgtcacacaggttagaatacagtgatgcgatctcagctcactgcaacttccgcctcccaggttccagtgattctcatacctcagcctcccgagtggctgggattataggtgcccgctgccacgcctagctaattttttttttcttttttgagatggagtttcactcttgtcacccaggttggagtacaatggtgtgatcttggctcactgcaatctctgcctcccaggttcaagcgattctcctgtctcagcctactgagtagctggaattacaggcacctgccatcatggctggctaatttttttatttttagtagagacagggtttcaccatgttgatcaggctggtttagaactcctgacctcaggtgatccacccgccttggcctcccaaagtgctgggatgacaggtgtgagccactgtacctggcctgtttttgtatttttagtagagatggggtttcaccatgttggccaagctggtatccaactcctgacttcaagtgatctgcccgcctcagccttccaaactggtgggattacaggtgtgagccactgcgcccggccacatcttctattttatttttatttacttattttttgagacagtctccctctgttgcctaggctggtgtgcagcgggatgttcatggctcactgtagcctcaacctcctgggctcaagcgatcctcctgcctcggactcccaccatgttgggatcacaggtgtgggctgctgtgcccagccttgtggtaattttagacagatccttaatatgttaaaagactattattccatctgtcagacacttagtgccaggcactgcagtcttgaatgctgaggtgggcacaaagctctacctccattagggaattctgtcttgtaagcctagctatgacaggtgaccttgactatacctctggggaaacctgggcctctcaaggcctgagcgtgaactgtatggcagaggctgaattaagagccacgtgacacagacgtgctgagaagggaacggcagggagttgggtcatttcagggccctgcccactgggtgctgggataggaagcagcatcctctttcacacacagggaccggtgccactcaacgaagtggatccctcgacaactggggcagggtggcagattccaatccggcaggagagccagcctgcaggagggggaaggtgaggttgctcagggagccagccaccctggtcttccagatctggcaccaagtcatgcctacttagagacatttgggcaactcagtcaacaaatgtggcatcccggggtgatcctccaaacactttttttttttgacagtttcactcttgttgtccaggctagagtgcaatggtgagatctcggctcactgcaacctctgcctcccgggttcaagtgattctcctgcctcagcctcctgagtagctgggattataggcgcccgccaccacagccggctaatgttttgtatttttagtagagatggggtttcaccatgttggccaggttggtctcgaactcctgacctcaggtcatccatccgcctccgcctcccaaagtgctgggattacaggtgtgagccaccgtgcccagcctcaaaccctaactcttgcaccccatccagcaggagggccccctcccctgaatatgctccattgagatgaaaggaaagtgcttatggaacctctggctgtcaatcacaggaaattccggtcaacatggcctcttgcaggaggtccaagtgtatcaggggcaaggtcatgctggtacagggaggcttggcaagaggcttgaaacttatttttggctctttagaaattacacaacccttcagctctagcagctgggggaagtttcacaagctgtgattttcacaggaagcaaactctctcagaagctgccctgttccttggtccagtgtcccacaagagcatccaactttggaagcatgctgctgccaggtcatgactacagaggcttgtcacctgagccccatgcccttctttgatgcactggctgcctgtccctttgtggtttcactcaggaaccctatagcaggtctgtaggatacgggtgaccattgaactcacaggtgtttggtcgaactagcctcttactatttgcagggaggaagttgacttttttcactggagatggggtctcggtccgtcacccaggctgcagtgcagtggcataatcatagctcactacagccacaaattcctgcgctcaagtgattctcttgccttagcctcccaagtagctgggaccacaggcttgtgccacacgcccagggaatttttaaattgtttttagagatgaggtcttgcttggttgcccagcctggtctcaagcaatcctcccgccttggcctcccaaagtgctggaatttgtctgagccatcatgtccagcctgttgatttatttttgttacaagtagtgacacaactggaatcaagttttgggggaagacagaaaagccagccagccctgctctctcctttctaaagcagttgtatcattttggtgtatatccttgagccctttcctctcatagccggtagaatcctgtacgggtgcatttaattcatgtcctgggaaggtagacaaaaaagactaaagtgtacccacgagcacctgatgttgtccagctgaggtcaatactaatcggcaaaacctaaacaaagagcatgtggaaactcaccgaaataaatgggcccctgcaacataggcagactcgactctattaaaaatcaacaaaattaattgggtgtggtggcgcgtgccggtggtcccagctatgcgggaggctaaggttggaggatcgcttgagcctaggagttcagggctgcagtgagccatgatcgagccactgcattccagcctggacgacagagaccctatctcaaaggaaaaaaaagaaaaagaaaaaatgtactgtgttgactgtcaggcacaggggctgaaatggctctttcaaccagggctggaaagaaactggagaattaactaacggctgtagagaaatactgactcaagagttacagaagctggttgggcacggcagctcacacctgtaatcctagcactttgggaggccgaggcaggcagattgcctgagctcacgagttcgagaccaacctgggcaacatggtgaaaccccatctctactaaaaatataaaaatttagctgggcatgatggtgtgcacctgtaattccagctactcaggagtctgaggcataagaactgcttgaacctgggaggcagcagagattgcagtgagccgagattttgccactgcactccagcctgggcaacagagccagcctccgtcaaaaaaaaaaaaaaaaaaaaaaaaaaaaaaaagaagaaagaaggaaagaaaggaagaaaaaaagagttataggtatagggccaggtgaggtggatcattggatcatggctgtaatcctagcactttgggaggctgaggcgggtggattgcttgagctcagaagttcgagatcagcctgggcaacatggtgatacaaaaaatacaaaaaattagccaggcgtggtggcatgcccctgtagtctcagctactcgggaggctgaggttgcagtgaactgagatcgtgcctctgcactccagcctgggtgacagagtgagactccatctctactaaaaatataaaaaattagctgggcgtggtggtgtgcacctgtaattctaatttattttattttattttgacatggagtctcactctgttgcccagactagagtgcagtggcacgatctcggctcactgcaagctccgcctcccgggttcatgccattcttgtgcctcagcctcctaatcagctgggactacaggcaccccccaccacgcccggctaatttttttttctatttttagtagagacggggtttcactgtgttagccaagatggtctcgatctcctgaccttgtgatccgcctgccttggcctcccaaagtgctgggattacaggcatgagccactatgcccagtcgagaatcatcttaaatttgctgaagtgcccaggcatggtgatgtgcacctgtggttccagctacttaggaagctgaggtgggaggactgcttaagcccaggagttcaagtccagtctgggcaacatagtgacaccctatctctttaaaaaaaaaaaaaaaaatctggctgcagtgttataagtagagacatacgtgtatgatttcatctctaaatataatctttctttagaattatacatgggacacaaatcaccaatacagcaggaactcatagctatgagtacaggacacagctgtacacatgacgtgtgtacctaaccttctgagcaatgtcaaggcaactcaactgtgtcccatgttatctctctgcgctaacttcacaagctagtccctgtgcaagacatacctccactgtgtgtttgtgtgtatatatatatatatatatatataaatgataagactaaagacatgtacacaattagtatagctgaactagctaaaaagtctgcttcctgcttttttgttgttgtttttttgagacagtcttgctctgtcgcccaggctggagtgcaatggcgcaatctgggctcactgcaatttccatctcccgggttcaagcgcttctcctgcctcagcctcccaaatagctgggactacaggcacctgccaccaagcctggctaacttttgtatttttagtagagacagggtttcaccacattggccaggctggtctcaaactcctgacctcagatgatccacctgccttggtctcccaaaatgctgggattacaggggtaagccactgtgcctggccattttttttttctttttttttttttgaaacagagtctcgctctgtcacccaggttggagtgcagtggcacaatctcagctcactgcaacctctgcctcccgggttctagcgattcttctgcctcagcctcctgagtagctgggattatagctgcgtgccaccatgcctggctaatttttgtatttagtagagccggggtttcaccacgtcggttaggctggtctcgaactcctgaccttgtgatccatccgcctcggcctcccaaagtgctgggattacaggtgtgagccaccacacctggctttttctttttttttttttttgagatggagtcttgctttgttgcccaggttggggtgcagtggtgcaatctcggctcgctgcaagctctgcctcctgggttcacgccattctcctgcctcagcctcccgagtagctgggactacaggcgcccgccaccacacccggctaattttttgtatttttagtagagacggggtttcaccatgttggccaggctggtctcgaacttctgacctcaggtaatctgcccgccttggtctcccaaagtgctgggattacaggcgtgagccaccatgccaggcctcctttgtttgtttgctttttgcctttgttcataatcaaagatgagctctgctgccataacaacttcgttatttctgggtcagaacatctggcttctatgacttattcaaccagtgtctgttgaatttctcagctaaatgtggaagaatctatttccagatgtggaagataaaagtgcaaagggggcttggggcccctgagaaataggggtcacccaactggggcttaggggttagggtggttttttttttttttttttttgagatgggggtcttgctctctcacccaggttggagtgcagtggtgcaatcatggctcactgcagccctgacctcctgggctcatgcaatcctcccacttcagcctcctgagtagctgggaccacagacacgtgccaccaagtcccgttaattttttgatgtttctgtagagacaaggttttgctatgttacccaggctggcccaaattcctgggctcaagagatcctccttccttagcctcccaaagtgctggaattacaggcatgagccacctcacacagctgggttgggggttttgtcagattttcagttgacgctgctgagagtgaggcagattctccctttttcatggagaggagtccagaaggaggcagaaagcaagctggcagatcagtcacagagagccctaggactggaagagccaggatttctcacttgagttactcaaaggaaaagctttatcatccaggtacaattaacaatagcattctctggccaggcgcttaggattcaaagtgtaatcccagcactttgggaggctgaagtgggcatatcacttgcgatcaggtttgagaccagcctggccaacatggtgaaacctcgtctctactaaagacacaaaaattagccgggcatggtggctcaagcttgtaatcccaactacttgggatactgaggccggagaatcgcttgaactcgagaggtggagattgcagtgagctgagattgcaccactgcactgtagcctgggtgacatagtgagattccatttctaataataatcatcatcatcatcataatcatacgacgggcacggtggctcacgcctgtaatcccaggccgaggcgggcggatcacaaggtcaggaaatcgagaccatcctgggtaacacagtgaaaccccgtctctactaaaaatccaaaaagttagctgggcatggtttcgggcgcctgtagtcccagctacttgggagattgaggcaggagaatggcgtgaacccgggaggcggagcttgcaatgagccatgatcacgccactgcactccagcctgggtgacacagcgagactccatctcaaaaataaataaataaataaataaataaataaataataataatagcacttcccttcactgcattttgagtgtcctgattaggcaataaattctgtggtcattcctatctatgctccacccctgaaacagggaatccttcctttctttccctggattggagcaaagataaagaatttagattcaaaacttcagtgccaatacttctacaaactggctgtgtgactctggtgaagtcactccatttctattaaaaaatgatcagcagaggctggacgcagtggctcacgcctgtaatcccagcactttgggaggctgaggcgggcggatcacctgaggtcaggagttcaagaccagcctggccaagatggtgaaaccccgtctctactaaaaatacaaaaattagccaggcgtcatagcaggcacctgtaatcccagctgctcgggaggctgaggcaggagaatcgcttgaatctgggaggtggaggttgcagtgagccaagatcgcgccattgcactccagcctgggggacaagagcaagacttcatctccaaaaaaacaaaaaaaggaccagcaggttgaatttagcccttccggctctaattctataaataagttagtaaagtcacagggcaggggcttcctaggagtagaagtaccagataatgaccgcacaaccattttttttttttttttttttttttgagacggagtctcgctctgtcgcccaggctggagtgcagtggcgcgatctcggctcactgcaagctccgcctcccgggttcacgccattctcctgcctcagcctcccgcgtagctgggactacaggcgcccgccaccacgcccggctaattttttgtgttttttagtagagacggggtttcaccgtgttagccaggatggtctcgatctcctgacctcgtgatccgcccgcctcggcctcccaaagtgctgggattacaggcgtgagccaccgcgctcggccacaaccatttttaaatgcaaggaacacaaacaggctgattgaaacctgatctcctgccgtcggggagctgggaatccctcaacctattacttccttccatctcctcctggcttttaaattaaatcttattccacagcgtcattctacactttatttatttatttacccgctgccttgttccagaaaggatttaactcggcatattctatagttagccacaagtagactccttaatttaaaaaggagcgagagagaccggggagagacagacccactggcctacccaaagcacatccacatctcactctatcagctccaagctagtccaggcgaccagctttgagggcaaaacacctacctgcccccgagaggcactagttagcatatcctggcttcacaggcccccagatcaccacctcctcggctgctgccttttctctttcaaccaccaagtagaaaaatggcctaatggagtacttcttcctgaaagcaggacttgcctgttagtggtgccaaggctccctaggtgaccttagattttggatttgtacaggccttgacttgaaaggtcttttgcgttttgtggctcctgtcttctcatctgtgagatgagagccatgcccacctttaagtcacacagattaataagtacatctacggaagcaccttggaaaagatgtacaggaggctgtgacctccaagctccagccgactgtttgaagctggagcccgtcacagctcagcccaatccacccaccccccagactaggtcagaccatcaaaagcaacgggagcttggcactgattatccagctatattaaaaaaaaaaaagaagaagacggggcacggtggctcacgcctgtaatcccagcactttgggaggccaaggcgggtggatcacttgaggtcaggagttcgagaccaacctggctaacatggtgaaacgctgcctccactaaaaatactaaaattagctgggcgtggtgacaggcgcctgtagtcccagctactcgggaggctgaggcagaagaatcgcttgaactcgggaggtggaggttgcagtgagccgagatcgtgccattgcactccagcctgggcaacagagtgagactgtctcaaaaaaaaaaaaaaaaaaaagaagaggaagaagaagaaagaaaaagtgacagaaaaattgctgcagtaactcagctggaaacgggtgggcaaacctggagaactagctaatgcctgcctggctatgccacccctcggatctcagtgtgtttatccaagcccacagagaaaggtggggaaggggagctggggagacaaagttcccctcaaagacggtagcatcctttcccagggagagctcaagcataggggggttgggccccaacgaaggagagaaaccaggttccagggtatgtgcattggggcagaaaagcggcagcaactggtgggcgtggggttattgaaatattggcaggttggggaggggactggtgggacacaaatgggaagatggggttgagagaggtcctgaaaaggggttgaggggttttcacaggaaaaaaaggttactggaggggagggtcttcacggcaaggagagaggagcttgggtgagaggtctccatagggaaaataggagatggctgggatttcccccggggaaaatgggaaggggctggatattgggggtctccagagggaaaatgggaggtgtgagtatctcactacaggaaagagggaataagtgggcaaaaatgggtgggtggttgaagcgggggtcttgccacagggaaaccacggtggctgaagatctccgtgggttaagaaatggaggccgagaaggtctccccatgaaaacgggtacctaggaagagctccagagaaaaaagatggatgaggttccccacgcgggaaatggggcttggagggggttaatctctatggggaggtcggggcgggcagtgggggaagaggccactgggaggtccgagttagctggcggggggtctccacccgggaggtcaaggcgggcagtgggggaggaggtcacggggaggtccgtgttggctggtggcggggggtctccaccgggagatccggttgactggcgggctgggggagatcggggttggcggaagggggacgaggggtttcatgggggagatcaagttggccatgggagcggttctctgaggggaggccggggtcggcccgggggtgggggtccccgcacaggcccagcctcaccgtccgccagggcttcactgcactcgaagctgatctcgaaccggaaggggctgtggaaagggctcgggttctccaggaccgccacgttcagcaccgacaccttggccatcgcctcgcctcgccgcgccgcagcaggggcaggggctgtggctgtggcggaggccgcgcctgggtccggtggggtcagtggggtagggctgaccaggtccactcccgcctcttctctccgagaactgaagtgcgcacctagtccgcgcgccgccttcaaatagccggcctccgccctctggccaatcaccgccaacgctccctggcggcgcgcgcaccccctcagccagtcctggagcgccgatcggcgcgcgcccagactcctcggaccaatcagcggagctccctctccgcagcgtgtgaggagggcgaaactatctccaagcttcttagcgtgtccgctggaaaccaatccccagcgtctccgacttggatgtcaacggcgggaatggacggagtcacagcgccggcctccttctggccaatcctgagggttcccgcaccggcgtggcccgcccctcgcctcgcttttccgggagatgcatcccgcagcgcgcagcgccgccacccgccgagcggtggcgcgcggcgctcgctaaagaaggcgggaagggcggtgctcgcacccgaagtgattggcaggagggagtggggcggagataaagagggttttctgagagtttattggctggattggtaatggtggcgggagcagaaggaggctcagctggggattcgctggagagaagcggaagtcgagcgccaccgcggtgttggcgagtgtgaagagagaggaggagcgtttgcggcctcagcgtctgtcaacaggtgagcgtttcctggagcttttctgagtggctcctgacccttgaggtccagcggcgcgggagtccgttgtgaacgttgcgaacgttcggagtggcggtcacgaggcgcgctcagacctcgggaatccggccgggttcggatcccgctttcgcccccgaggggttcggatcccgctctcgcccccgaggggttcggatcccgctctcgcccccgaggggttcggatcccgctctcgcccccgaggggtttggatccctctctcgcccccttgagggctcttgggaggtttcaagcggacggtactgaaaatgggagttccagttcgggggcagaccagtgttcagagtccgggctctgctactcagcgcccgaggcagcgcctccccattcaacgggggccgtggcaattccctgacatgattcatgaccacataatacatccggaaacttctctccaccgcctcccgtctgggccgtcgcccccggcctgggagactccaggtctcagagtctctgcccccacgggcgatcagtgctgcccagtggaaaaataatgccagccgcgcaccaaaattaggtgtaaaattaacattttttggaagccacttttttttttttgagatggaatctcgcgctgtcactcaggctggagtgcaatggcgcgatctcggctcactgcaacctctacctcccgggttcaagcgattctcctgcctcagcctcctgagtagctgggattacaggtgcccaccaccacaaccagctaattttttttctgtattttcagtagagacggggtttcaccatgttggccaggctggtctcgaactcctgacctcaagtgatccgcccgcctcggccttccagagtgctgggattacaggcgtgagccactgtgcccggccatatctttttttattattatttgtaattttagaggctggtcatggaggatttcttgaggccaggagttcaagatcagcctgggcaacataacaagacctcatatctacaaaaaataaaagaataagccaggtgtggtagtgcatacctgtagtgtctgctactcctgaagctgaggcaggaggatctcttgagcccagaatgctccagccactgcactccagcctgagtgtcagagtgagaccctgtctctaaaaattaaaattaaattttaaaaaagaaagttcagtttagctgtcttgatagccgcagttgagtgctcctgagcccgtgtgacaagtggctcctgtattactggacagcgaaggtcagaaacacatttgaccaggtcacttctccggatgagagcattgtctttgaaactctatgctttgtctcctgttaaccacccagctccaacttcaaaccaggctaagtaaccctctttttgttaaaattctgacaagccactcccagtgcaaagcctctgcccagaacctcttctcctaggctcttggcatggcttatgccttcttgtcattcaagtctctgttcaaatgtcctctccccagagaggcctttctaagggtgctctggacagtgttcaaactcacaggccgtacgcctgaacagcactgagccaaggcactagtatttcttacccagtcacctctgtgggctcactaggactcactcactgtgctagtatgttttccttttccttttctttttaaacaatccagttcctgtgggattttttttttttaatagaggtctgttgcccaggctggagtgcaagtggcataatcgtggctcactataacctggaactcttgggctcaagtgatcctcccacctcagcctcccgagtggctgggatcaccagtgcgtgccaccatgcctaatttgttttattttattttattttttttttgagagggagtcttgctctgtcactcaggctggaatgcagtggcgcaatctcagctcactgcaacctcctgcttccagcttcaagcgattctcccacctcagcctcccgagtagctgggactacaggcacacgctaccttacccagctaatttttgtatttttagtaaagatggggtttcactatgttggccaggctggtctcaaactcctgacctcaggtgatccactcacctcggccgcccaaagtgctgagattacaggcatgagccaccgtgccctgcctcttatactttttaaattttttgtagagacagggtctcgctgttgcccaggctggtcttgaaactcctggcctcaagcagtccacctatcttgtccttaagtgctgggattacagcgcctagcccatttttggtatctacatctcacattaagttaagaaaaattctttttagctgttaaaaaatcgaaagctttgtttttattcttttgaaattatttggcttcaaggaaactcacatttatgattcgcttgatttcttggcaatcattgcatacttagggatatttgtgatttgagaaaatctaatttccaaatgtaattcgattgcttatgaatactaaatttaatgattaatgcagttgtcatgatgtcacatttctagatgcttaattaaacatttattcattccaactttgtagttttctctttgcattgtggaacttttttccctttatccctgtccctgaccttttcgtagcccctgagaagctcatgatccaccagcattatttccgtggcgctaatgaagaatgtggccctgtctatgatgcattctccttacagctggctgaatgatcttcacttgtaaaccagatcatgtcattactctgcttaaaaccttcagaggcttatcctacttagaatgaaacctaagatctttcctatggcttaggcggccctgcgtggtggcctcagctgacctctcaggcctcatctaccattcttcctcttgtcaccgctctcaagcccagctggctttatttcccttctttcaacacacccagcttatttctgccgcagggctttgcacttgccgttccctctgcctggaatgtgcttcctccagataattgcatggctgtctctttctcttcgcttgtggttcagctcaaatgtcctctgaaagaagacttcccagagtaccctatttaaagtagcactttcttggccgggcgcggtggctcatgcctgtaatcccagcactttgggaggccaaggcaggcggatcacgaggtcaggagatcgagaccatcctggctaacatggtgaaaccgcatctctactaaaaatacaaaaaattagccgggcgtggtggcgggcgcctgtagtcccagctacttgggaggctgaggcaggtgaatcgcttgaatctgagaggtgagggttgcagtgagctgagatcgtgcctctgcaatccagcctgggtgacagagcaagactccgtgtcaaaaaaaataaataaataaataaagtagctttttcttaatcacatcactcagttttatgatcttagtaacgcatatcagaatttgtacttattttcgggtgggcatggtggctcacacctataatcccagcactttaggaggccaaggcgggccggtcacttgaggtcaggagttcgagaccagcctggccaacatggcaagaccccgtttctactaaaaaaaaaaaatacaaaataaataaataaataaataaataaattagctgggcgtggtggcacgtgcctgtagtcccagctgctcaggaggcagaagaattgcttgaaccggggaggcagaggctgcaatgagccgagatcacgccactgcactcaagcctgggcaactgagagagattccatcttaaaaagaaaaaaagaatttctacttattttggttttaaattgtgcttattatctcatcatccctcagtagattgaaagctggttgtgagaagagatctcgcctagctcacacctctcaatgttgtacttccagagcttagcagaggacgtggctcatagaaagtcctcaatcaatttttcaaaaagaataaatctggctgggcgcagtgagtcacacactctgggaggccgaggtgggcggattaccaggtcaggagatcgagaccatcatggcaaacatgattaaaacctgtctctactaaaatacaaaaaattagccagccgtggtggtgcgtacctgtagtcctagctacttgggaggctgaggcaggggaattgcttgaacctgggaggtggaggttgcagtgagcctagattgcaccactgcactccagtctggtgacagaggaagactccgtctcaaaaaaaaaaagaataaatctatgtaaagggtgggtttagcatagtacctggaatgtgaaaagtactcaataaacatgaaccagccaggtgcagtggctcacgcctgtaatcccagcactttgggaggctgaggcgggtagattgcttgacctcaggagttcgagaccagcctgggcaaaaccctgtctctacaaaacataaaaaaattagccgggtgtggtggcatgtgcctgtggtcccagctactcaggaggctgaggtgagaggattgcttgagccctgggggcagaggttgcagtgaaccaagatctcaccactgcactccagcttagctaggcaacagagtgagaccctgtctaaaaacaaacaaaagactgaactgttagtagcatatagtaataagcagatacgtcttcattcttgtttaatacttcaggtgcacacatgctcgagaaagtataagaagtgctatagcaaaatactgttacccagcttaacagctaaaacattagagatgcaactgaagggccctatacccctacatcaaacccattcctcttcctttttcctcacatgtaaccacaaccctgaatttggtgtttacagtcttctgtgcatatcggcgtgtatctttaaacaatatatagtattgtttgtcatgttctatacttttatataaatggtgtctgcgcaatttagagttaacctagcaggcctgagactgctatccttagaaagacctgtttgcaagattggcccttggctgatatctaggaacttggatttcaggagggttcctgccgttccccaaatgatgagtgcctaaactgtttccaccaacaatgtggttcatgttgaacacctgctctccttctggagtctggcattttggtacacgaccacccccaagtacaactctggtcactgagtaatgagcttccctggtagaccgcctatccgtcgtgctgtcatacttggcggtaggaattgatggagtcctgtgtgactccactaggagaggactcttagaagcttgtcctggtttcctctggacttcagctcctgcatcttttccctttgctgattgtgccttgtgtctcttcactatcataaatcacagccatgcctacgcttccaagcaaaatcctgtgactcctcttagtgagtcattgaacctcagggtggtcttggggacctctgatagcaggatcatactgggtgtatcctgacagagctggcactaaggtggcactgggtcctgccttctgaaacttgctttttttaatccagtgtaatgcttttgagatttatctatgtggaaacgtgtatagctctaattcacttattttcactgctatacagctgtgctgataaggtaaccactagccacatgtggctatttagattaaaattagacgaaacaaataatctacttccccagacacactagtcacatttcacatgttcagcaggagcctgtggctagtggccaccatggtgtatagagaacatagagaggaaacatttccatgagaacagagagttttgttggacagtgtttatcaattcacttggttgaaatttagggtgttttcagttttctaccattacaaacagtgctgcagtatgcgttggtatctatgtctccttgaacacatgtaggagttactctgggagataaacctaggagttgaagtgctggacggggggttgcggaagtattcatcttttcaagatactgctaatctgctcttcggaatcatggtactggttctcactcccctcgttagtgttcctgttgctcagtgtccttatcttttatttttatttttatttttgagacagagtttcgctcttgttgcccaagctagagttcaatggcacgatctcggcctcccgggttcaagcgccgcctcccgggttcaagcgattctcttgtctcagccttctgagtagctgggattacaggtgtgcaccaccacgcctggctaatttttgtatttttagtatagatggggtttcaccatgttagccaggctggtatcgaactcctgaccttaggtgatctgcccgcctcagcttcccaaagtgctgggattacatgtatgagccaccgcacccagacatcttttaatttttataatgttttgatgttcagcatttttaaaaattattattattattattattatttgagacaaagtcttgctttgtcgcccagggtgaagtgcaatggtgtgaacttggctcactgcaacctccgcctcccgggttcaagcaattctcctgcctcagcctcccgaatagctttttggaccagtctctcatgcctgtagtcccagcactttgggaggccgaggcgggcgggtcacctgaggtcaggagtttgacaccaacctggccaacatggctaaaccctatctcttctaaaaatacaaaaagttgccggggttggcggcgggtgcctgtaattccagctattcaggaggctgaggcaggagaatctcttgaacccgggaggctgaggttgcagtgagctgagattgcaccactgcactccagtctgggcaacagagtgagactctgtctcaaaaataaacaaacaaaacatatattctgagaattaaatgagacaaaatgtaggaaagagctttgaaatgatacatttcagcataaatgtaccgtccctaggcacatgcagatgaatgggtgccactaacaactacctgagggtcagaggttgtcaggcacagcaggtttatttttatttttgagacagagtctcactctgtcgccaggctggagtgcagtggcgtgacctcggctcactgcaacctctgcctcccagtcccgagtacctgggactacaggcgcccaccaccacaactggctaatttttttttctttttttttttttagtagagacggggttttgccatgttggccaggctggttttgaattcctgacctcaggtgatccgcccgccttggcctccaaagtgttgggattacaggcgtgagccaccgcgtccagtcaggcacagtgggtttaggttgtgtgtagtgaaggggagagtaaaagacacagaaggactggtcatatttggctctcattgtatgcgggattcgatttcaaatcagagcatgaggtcaaatcacatatagttaaaattatctactcttttttttttttttttttttttgagacgtggtgttgctctgtcacccaggctggagtggagtgtgatcttggttcactgcaacctctgccttttggggttcaagcaattctcctgcctcagcctcttgaataactgggattacaggcgtgcaccaccacgttcagctaatttttgtagttttagtagagttttgccatgttggccaggctggtctcgaactcctggcctcaagcgatctgcccacctcggcctcccaaagtgttgggaatacaggcatgagccactgtgcctggctacaattatctactcttaaaagtccccatgcttgcccacagtgcatctctcagaaagtctagtagattcatttcatcctccagtgtgagaacagattacctcttcttcagctgggcaccagaggaaatactgatcttaggtttttggagccacgctgaattaaaaccttagcatcacacggtgaaactgaacccgctgagggaatggtagattcacagtttctatcattcttttttttctttttaatatatttctttatccttattgaagagcttccatcgcccttcactctcatcttgtgctcactttgggtcttgtgctgaattcagctcccattctttaacagaaatttacatatcgcctgtgtgccagatgctatgctaggctcagatcaagaacccttgcattttcagatcttacattctagccaagaggcagataataaacagataagcaaaacgtaattgctagccagtagtactatgaagacagagcaaggcacagactaggaagttctggagtggcttgggaaggccttctgggaaataggatttcattttcataaactctgcaggagaggaagtcaactctgtggatatggggatgggggagggggcccaagccagcagcgagaacagccggtgcaaaagccctgaggcaggcaagagggtgcctgcatgtttgagtccagcgagtggacggaaggtagggaggacgccagggggtgaggttggagggcctgtaggccattgtgttgacctttacctgtgctttgggtgagataggagagcattggagagttttgagctgaggagggacaaaatctgtttaccaagatcactctggtttctgtgttgagaaaaacctgaagagggacaaacgagctataatatttaggggactgttgtagtggctctggtgaaagatgggtgagaactaattaattctggatatttagaagttagagccaccattgcatttactgtcaaattagatgtggggtatcaaacaagatgagttcaagagaagctccaaggtctttagcttgaatcaaggtatggatggactcacttttagttgaggtgaggaagcctcaaagcctcacgtgggaagaactacagtggtggcagtggtagagatgggggtgggagaggccagggtctcagtttaggacaggttagtttgagatcctaccagataccaggcagagagatggggtaggtaggtgaatatatgtaaatctggagctcaggtaggagttcaggctggagagctacgtttgggggtgatcagtgtataggtagcgtttctttctctctctctctctctttctctttctttccttttctttcttttctttttcttctttccttcctttctctttctttctccgtttctcttttcctttctcttctctttcttttctttcttctgatggagtctcagtcgcccaggctggagtgcagtggtgcgatctcagctcactgcaacctccgcctcctgggttccagcgattctcctgcctcagcctcctgagcagctgggactacaggcgctcgccaccacacccagctaatttttgtgtttttagtagagacgggatttcaccttgttggccaggctggtctcgaactcctgacctcgtgatctgcctgcctcggcctcccaaagtgttgggattacaggcatgagccactgcacccacccggaggcatttcaaaccatgagatggggtgaaaccttccagggagtgagagaaaaggtctaaggactgagcccctgggttccccatcattaggaggtcagatgagaaggagccagccatgaagactgggaaggagtggctgttgtggggaggtgggtggtgtcctagacacaggtatctttttaaggcagaggggcccggaaaaggatccttgtagtttgagtagttatgcctctctctgagcatgggcagttcgttggtgaactgacaacgtgaaatacacatgatgcaattccaccgtgtgtcaagtttgaaagcactccctgccagtagcgtgtgggagtgtaggaatggcaattgtaatgagacatcacagtgtaaaattcctgagctctgctctagtacagcctggggacagacgtctgggccaagaagggcttctgtgagacagcatggaacagtggcctggtcagagagacttgggcatgcatctgagggctgtaagcctcagtttccccatctgtaaaatggaactctaatcgctgtctccatctgggaggattttgtgaggattcagagaaactgcacatgaaatgctccaccaggcccaggaacttaccaaggtctcataaacgtgaatgattctataactgtcaagcctctgccaggggttctgaatgctcgagtgcagaccagagcccatggggacgcccctgtgcagatctgctcaaccatttctttctttcttttttgagacagaatttcactctatagcccaggctggagtgcagtggtacgatcttggcttactgcaacctctgcctcccagccgggttcaagcaattctcctgccttagcctcccaagtagctgggaccacaggtgcttgccaccacgcccagctaattttgtctttttagtagagatggggtttcaccatgttgactaggctagtctcaaactcctggcctcaagtgatccacccacctcggcctcccaaaatgctgggattacaggcctgagccaccgcgcccagctattcacccatttcttactcccccactcaagaagtcacaccactcttgtcattccaagaaatcttaatttctttattgtttgactttttgactcaacaatttttttaaaactttttgtttttttctgaaacgttcttgttgttatgagccttttgttttgttctcgttaaatgcactcgacccaaaattggtttggcatatcgaaaaggagaccaaggagggaggggctggggcgtgggaggtggggaggaggcccgaatggacagaaagttgaggataagagaagaggaacatagagacagccagaaagacatggggaaagagtgttggagacagagaaaggggaaggcaagggaaagccaaaagaaaccaaaatccagagaaaaagaattaacaagatttaggagcaaacgagttcaggagcctaaggaagggagtaggagaggaaaccaagacccttctctgtaccgtcccagctggggtgggggcgtcaaggcaccaggtctggttaggttggggggacacctgggctctgggggcggctttgcactggactgcagtgatgtccagccccagcagggggccctgccacacagctctgaggcctggaagccacccggcgatgccggctggaacaggacccgatacaccctctctccctttgattgtccgagtctggagagatacaaggaaggctgggcagggaggaagttggcctctctgtgtgcctcagccccctggaactctcctggccctcctcctggtgtcgggggcagccacaggctgggctgcttcccgggacaggccagctcctcgcctgctcatgcctcctgcccgctcttcacagacctctgaccacccctccacacaacagagctcccagcctagtgcagtccgggaagggccatggaactgtcccttgccctcctcagagtcgtctggcaagactgtccctggcctcacttctcctccccatctagacttcacccatggtcttctggtgtaatgggttaggcctttctaccagaaaaagccagagttggaacccaaccccacctcttccccacacctgttcccttacacgggacaaaccaccatctttggtctgaccccttctcccctaattgatggggacaagccagccccagctccccgggagaagggaggggctttctagcagcaaaaagggtccctccagccacctacctgtccccttccccccagttccttcctagagcccctcccccttaacccaacaaagttcatggcagcagcaggctgagacccgaagatgtttgaaaactcatggcacttgtgagaaaaggaggggcagagagatggggagaggtcagagcagaggtggaggggccacctctggggaaacggcaatgcaggggctgggctagggtggcctggggctatgctgcccctagagttgagggaagggggctggggaggctggcctgacaggctggagaggagggggccgggacaggtgctcaggacacatcccgagcctggagcttccggggtctgggatttggggtcaagccgcccagaacatgggtgtcccgaccccagccctggcacctggcttcgtcttccctgcgggaaggtggaggatagggaaggtgatctctcacctttgcccctccccatcccccagaccgccttgccgttcccagcaccctcctcagccatacccatgccctccacaaccccagtgcctccccattttccttctgccatcaacctctctaggtgggaaatcagccccatcttccccggcgagagtccccagagcaatatacaagaagcaggaactcaaagggacagcgcagccatcttgacaaagcatctttgggtgtgaagaggtctcccccgggccggtggggagggaagggggagacaggcctctggtcctggggcaggcagtgagaggtacacgccccagaagggctgatgatgccgggcaggcggagcaggaaaggagggtgccaggaaggaaatgggttctttgtttcgctgttgcatctagattttgttttctgtctctggattgtaaaaagctgctctggcggcccgcccgccccggcggggactggggatgcacgtacacggagaagtcctggctgccaggccagcagcgctgctctgctccggagaaagcccgggctggcccgggccgcaggctcccggtggcttcaagtgatgagattttttttcttttctttttttttttttttgtcttttttttttcttttccatttcgttgaaatatttacagcaatggggaaggaggaggagagaggaaggagtaagagggccccctagggaaagatccaagcccaggacccactccccagggagatccagacccaaaatctgctccccagatagccgagcccacaggactgggaactgcccaaatatggccacccctgtgggctgggggccctgcggggagttgtgcttcatcaggagtcgccccaagggagggggtcattgggtgcactgggaggcagagggggcaggtttgcttgcggggcagggaccaagagcaaggggaaaggagcttcagagaaagttcaacctttaaaccaccagccaccaccgcccagtccccctgccctgcggccttttcccagtctccagggagcagggaattacagcgcaggaggaacctgtccatctgtcctgcctcactgctccctctgggtgcagccggcagcatttctggctgcggagaggagcagctaacaggttccatccagtgggggcctttggcaacctcagaagctgcccctccctgcccaggaaactaaagccctcatttcccttcacagggtagaagggtgggagaggggagagtctggaagtgggctgcacccttccaagttctccctcctcactcccctggggtcctctgggctcctcctcactacacttcccccaaatagagctggtgcgtgtggctggtgggaaaccctgtctgtgaaccctggcacctcaggcccccaggttagagtcccctgaggggactgtagggcccatggctgaggggcacctggagagagtggcccaccagccactgcctccatctgtctccctctcccaccagagccctgcccagggttccctccctggcctgggccaccagcccctggtccatgaggtgccctcagagactggtgaccagctgcatctgcccgtccccatcgggccctggcccctcaaggcctggggctgccaggtagccctcgtggctaggacgccgcacctggtagtagccctgcaggggattccgggccaccagggctggcgggcgcgaggtgtagtagatttcgggggggccggggggtgcgggagggggtgggggcagggcctcactgggcccctcagggctgctgtccgggtaggagggtgagtcccgcaggttggccccgctggcatagagggagtcccggccaggaggggaggagaggggccggctggtggcgccgtcctcggccgtgcagctctccgactcgtccagatcgctctggtacagcaccgactgggcccggggcagcagcagaggctcctccagggccttatagagaagttcaatctcggcccggtcagcacccccgggcccgcccgcctcttcctcgcccccgccccctggcacaggtggcacagggggctcaggcggtggagggcccttggccgcgctgctgctcccccgcaggttgttgtgcaccagctctgagatgatcatcttctcaaaggccgccgcatcggctaggttccggcctcggggcggctcagggcccccatccccgggagggaaatccccacttcgcaaggagtaactgttattgaagttgccgttcaggggcagggtgtccatgccacaggcttcccggcctcccaaggggtgctctgcagggcagaaaggggctggtcaggttgaagaggggccctggatgcactaggggacagtgagggggtgcggtccatgtggagaagtgggcttgattcctgctggttttccgtaggcttccccctgccccctggatctctgatctcacattccctttctccctcactggcactagacacaccagcccagcagcgtattgatgaaaggtgggggacaaggaccagttcccccaggatctcatccccagctggaggttcagaatctcagcagtgtgaggaggcctgggcaacaggatcgctttcctgtgctcagaccctcagcacttaacagcccaaactcaatgaacaccatccattatcctccattcggctgccagaggctgtgtgtcggggggtggggaaatgtgggcatggggaggcatcccgagttctcctccttaagtgaggccgtctgagaaggccactgtctgtccctctcccagcctcagaaacatccccagggaagagtcacacttactgggttcccggtagctccctgcaggtggcagccagaagagagaagagaaaaggcaaggatgagctcgaaatgcaagtccaggctccagttctggggcacagaacatcccatgcagaggtcccttgggacacaaaccctccatttcccaacctgggatgtttcccccgtgctctcacctggggagttgaagacagggggcgaggagggattgaagcccactgactcggcgatgagggtgttgtagggactggtgcccccacggggctgcagcacggggttggtcagcaggtggttccccatggtacctggccaaaggatcagaggtcacaaggcagccgggagcctccagagactgaagccagaggcagaaggatgccttctcacctcggttcagggtgggggtgctgttgatgtcacccgccatgaaggaggactccgtctgtttcctcacagtgtcattccacatcctccgaattcggctctgggaacacaacccaaatgtgaggggatccttgggccacccaccctctggcgtctttctgagactgctcacctgatcatcacgatcagaaacctaggccaagccactccccacctctcaggctccaggttccaacactcagccccagggagtcctgtctggcccgatacctgggtccctgtgtagtagcgggtgttgcttcgcatggctgaggtcttgagggatccgtgagtgcccccgggtggggagcggatgcagcagtaggagtgacgcaggcacttgctgtactccttgtgcacctgggaggtggaggacagtcagctggctgggacactggcctcctctgtgatccagtctcccacagggctggtcacaagacaggcagccttgggaggccggagaccgagcttccaatgactgtgttcccctgttcagcgacttgcaggccacggaagccttgatgtcccctgtcccccaacagccagccgatcaggtttcactctcttcttactcaggcccatcctcttctccacctcctctgacagtttttcattcattcataaaatcaacagagcattattgagcatccgctatgtgccaggcacaatttaggcctcagggaaggtatggaacacaacagacacaaatccctacctctgagagcttatatttcagtagacagagacagaacatagatgaaaatataaatatgcaagctgttggatgctgttaggtgctgcggagaaaactatggccagaaagggggttaggcagtgctgacttgggagcaggttgtgattttttttttttttttttttttgagatggaatcttgcactgtcactcgggctggagtgcaatggtgcaatcttggctcactgcaacctccacctccctggttcacacgattctcctgccacagcctcctgagtagctgggattacaggcgcacaccaccacacctggctaatttttttttttttttttgtatttttagtagagacggggtttcaccatgttggccagactggttgtgattttaaatagatcagaggaggccaggcatggtggctcacacctgtaatcccagcactttggaaggcagaggtgggtggatcacctgaggtcaggagttcgagaccagcctgggcaacatggtgaaaccccacctctactaaaaatacaaaaattagctggtcgtggcagtgggcgtctgtaatcccagctagttggcaggagaattgcttgaagctgggggggtggaggttgcagtgagccgagatcgcgccattgcactctagcctggggacagaacgagactctgtctcaaaaataataatgataataaaaaaaaaacctaaaaaaataaatagatcagaggaggcctcatttaagccaaggtaagaacgggggctgcaccctgagggtccacatctaggtgtctgagagcagaggttggagggaggggagccgaggggcccagatcagaccataggggcctggggtcccctgaaaggacattgctgccactgcgtgtgaggtgggggctgtgaaaacactgcctttgaccgtgtgtccaaggaggggccaggacaatgttggacagagcagggacacaggccacctcctcccttgcaaccaggattctcatgatcactgcctctgccatcccctgccttaagccttacctgcctcaccactccccaagtccaacagcagtctccatggcctgcactgctgccaggactgactctacaaatgcctcagctccgtctccccagcttcagtcctgagggtgctgccagtatccccattccctgcccatgttccccagctactgttgtcccctttggtttttttaaatagagacggggtctctgttgcccaggctggtcttgaatttctgggcttaagcaatcctcctgcctcagcctcccaaagtgctgggattacaggcatgagccactgcacccagccctttgtatgtgtggtttttttgtttgtttgttttggagacagagttttgctctgttgcccagactggagtgcagtggcgcaatcttggctcactgcaacctctgcctttggggttcaagcaattctcctgcctcagcccctcagcctcccaagtagctgggactacaggcgcccaccaccacaccaggctaatttttatattttttaagtagagacggggtttcaccatgttggccaggctggtctggaactcctgacctcaggtgatccgcccgcctcagcctcctaaagtgctgggattacaggcgtgagccaccgtgtccggactgtatgtttttttaagattcagattttaacacatttattttaaaaagatcctttctatcaccacaaaattcacaattctttccagaactatgaatgtaggcagtgctccctcagggtggctcccaaagtcctccctctcccaggcctgactcgtggccctcatggtggtgagggttccccattaccaaatctgttctgctctcactcctctaagttgctgtatcttgttttccagaaccctcttcacccgtggttaaaccctccctaaccctgagctcgtgctcccctcccggtggacgcagacctgaccacagaagccctgcagcactcactgggggcttgagggagcccctgagtcccctccaccctcgccgccttctcctgggtacccaggaaacgtctccaagggaggctgtgacccaggaccccgcctcgacctcaccttcttctgtaaggcgcagtgaaagacgaagatgaagaccccctggaaggcgttgaaggtggtgaagagataggccatgaccaccgactccttgttgatgaagaggaggccgaaagcccaggtgaggcccagcaggaacagcagcgcgatggcccccagcgcccaggatctgggagtggggcgacaggggagtcaaagtacccgccggaggggacggcctcagcccaggcctcccctgcagcctacaacgggggcccttgggtgggcctgggcactgtctgcaaagccctgagcgggccgagtgggccttgggggcagtggcctgcccaggacacctccaccggagcctgggcctgagggaaaggtactgggtcaggggtcggggtattgtgaacatcagttattcctctgccaacttcattgtttctgctaaatttccagaccacttaggctatatttgctgcctatttctctttaagttgcccttaaacagactcaccttttgaatttagcctcagcctacataccgatgcccctaaaaccacaggttggacgtgctaatgatacgctatctaagacccattaagtaggtacatagtgaacacaatagaacacccctgttggtacttaaaattgcaatgtgtgtcaccagaggtgacagcactaccttttaggacaccctggaagaggtgggcccagcgtggggcgggggtgggtgatggggcagggggcaggcaggggcgaggctcacttaatgttgtccaggcggctggagtcgggcttgagcacagatgagcttcggatcatcttgtgcagggtcaccatgaggaacaccaggttgacctgggggcgggacaaggggcaggctgggctgagagtggccctgcctccctcagtgagcactgaggctagggcccagcctggcgaaatctcagctgtggccctcgcctctgctgggagaaccccgtacctgcccctgaggtgcccgctgtgcagcggtgagctgattggcatgaccggcaatttaatgccactcctggctgctgggaggacaaggcccatggcctgacacacactaggggctcaaatcacagccccccaggcgagcagccctcagcactggagctccatggacccagcacactttcatcctctcagccggtggctcagttccgatgtgtggagagagagagagtgtgtgtgtgtgtggggggggtggggggcgggggcaggggctggggtcaaggccagcctggatgaaggaagatgtggtgctaggggtgtcacctcccaactcaccacgataacgaaggagactggcccgatgaaactccagatgaagtaattgtccactcggagccagcagctgtaaaggaaacagggccggggtatagagagaagccgaggagccattcccagcgactcatgaaggcctaggactctgcaggctgcagcctctgggatcaggaggaggaagggactaccgccctgagggtcctggtccaaggggtgccgcccagcagggaaccaggtgggagggtgcagggctgggaggtggaaactcacgccttctcggtgccgtagctgcggtagtcaatggcagccgcgatgcccaccaccagggccgggaagcagtagccacccaggtagtagtacttggtgcgggaatactcgctctcaaacacctccactagtagcaggtagaggtgcacgccctccaggcacagccaggagaaggcagccaggaagaaatagtgcagcaggccggcgaagatggggcaggcaatctgcggggagcactgagggtgaggggctgctgcctggacaggtgtcccccttcttctcccggcccccaggcgctggccgtcacctgccctagagtcccagcccacctcatactgagtcttgtcgatcccgaccaggaagagcagctcagccaggaagaggttgatgcacaggttcttgtggatggtgttgcggtcggtctgcagcccccgcaggaagcagaaggtggagatgcagatggccaagcagaccagggagatcacaatgcccacccaggtgatgaccgacagcagcagctcgttgatgcggccctggtactggggacaggaacagggggcacgctcagggcctttggttttgcacgctgggctcagccaggtgccagccacagacagggccctgggcaaggccatgggccgtgaggacctctggtgccgccaacctggcagccctcacccctctgcacgcagcaatgcgctcacttcctcatgctctggaaggcttgtggagagatgaccaacgtaacaccaacttgcttctccagagtgccttgggagacggtgggatcatggccatagaggaccagacgcatggcctcatgccccaggcaagaccaggggccccccacacccatggggctagcctcccctggtactgcccgtgatctctctaggatgccatgcaaagccaggccagcaatcgggcctgcctggaggagcagagcaccagccagcttacgatctcacggtgagccatgagcacagcgaagttggtgaggtggctgcaggcacacgtggtatgggtcttgttggactccaccaggcggcagccttgggtcgaccagtagcccagcatggaacgctccgagtagttccagaaggagcagttagcattgaagtggttcttgtcctgttgtgtggtggcaccagggtgtcataactagagtcagaaccggggagtcccattccgaccccccacacctggcaacagggatggtaccaagtatcaaagaagtgcctggggtctggggctccagttgacattctgagagctctggggacaaatggcccaagctctaaagtggaagaacccataacttgttctggaggtgagcacatggaggggcaggtacacagcctgggaacacagagggtacagggacccccatggagggagggggacggctcagctcacctccaggtgggccacggtgaagatgacagggtccatgaggaagacgcggctggactccttgttgatggatgctgcgatgacctgtgagttcaccactagagaggcgcccccagggccacccgggcctgcttcgccggccagcttcactgtggcattctccgtggacaggaagaggcccaggttgttgtagaggatgaagacaactttgaccacccctggtgagaacaggcacgtttggatgtgtcagcatcctcagctggcgcacctccatccaggcccctggcttcccagctcagccagctcctcagcccttggccacgctggccactgggacctctgaagccagtccatagcccaggcaggtgggggtcagggagccctgtccacaagaccactgctcagctgaaggcagttctaaacagcagggcagtgtgccaggacacacaagctgggcctccgacccacccattctcactgtgtgaccttgggcaagcccctgacctctctgagccttcatctcaatggccccatcctctctgagctgtgaggcccaggagccagctttgcaactgtaaggctcacccttagggctctgcagcacttcagggcccatgaatcccctcaaattttacactagcatgagaaaaggtcagcaccgctgccctctacaaatggcacagagacgctggcacagagctggggggtgggggtggggctgcttccccacccgaggccccgccggggacactgaccattgcggctgttctgcttgatggttttggcagacagctggatggagttctttctcgggtactcctcctgggggaacaccagctcctgcacctggccctctgtgttcaggactgtgacctccaggactgtggggacaggggaaggcaaggcatacacagttggggtctgttcccagtccaggggctcaggctgcagaacgagactctggcaagatgcccaagggtcggatagcccccctgtggcctccaggccagaaccccgtggtttaaggttcgtatctgagtttgccctgggtgactgtggcactcacccacgttctccttggcagccaggaagcgggcaggctccctgacattgtcggccagcaggaaggcgccctcctccaggacgtcgaggagcatggtggccgtgtgcacctgctccgtggcattcatgtccttccaggactccagagcttctggccggagcagattgtccactgtctccaccacggcctgcacaggcagagggcatggtgctgtgagccccccaacaccctctaattcctgggggtgggctctgcatgccctcttctcaacctccacccctaatccccccatcagctggagcccacggtccttacactgggaccccctgggtctcaccttgatataatccttacaagttctctctcgcttgtgcatctagaaagagatggaggtgatgtcaggccaggcctctgggtgccggttccctcaccctaatactgtcacatctggatagctctctcgtctgcggttaccactgacccagggctgggctatcagcaagacattcctcagggatccccaacccccaggaccatccggggcagcacaggagtgagacccggcagtccttggcggagaggggggggtccttcctctctgaggaaaggagtggaggtggcagcctggctgggaggtaccaggtcaggtacttcccaagcccctgggggcaggcgccctccccataccaggtcagcgccaccgccaggccccaccttgttgtagttcttgccggctgactcgcgctcgatgggccgcagggcctgcagctgggcatccaggatgtccagcagctgctccatcagcttcacagaggaggagacgtcccccgcgtagatggagccccgggtgtgtcgggccagctcgctggcgatgttggccgcgttctccccactcttgatctgcatgaggtgggggcgggaagggggaatcccaggactgtcagggaccatcctgccctccccggcttccctggcctgtgcagcctctcctatctctctctccacttccccatcgccatctgccccttcccaccccatctgtccctgctccctttgtaggccagggaggtgaccccacagtcctgccttccagacctgccagcccatgtctccccagctgctccacgacccccgctgggccctgggccctgggcccgagcacatgtgcctgcctgcgaggggtggtggctggtaccttctgggccacctggttgacccagggggaggtgcagttgctgaggtcagggccccgggggttccagagccccaaggctggtagacactggaaggaggcaattcctgcagggacagacagacaggaacagacaagggagccaaagggaagaagagaaggatgggacagagagggggaaaggagatgacagagagtgggggacgagcgggcgaagagggaggtgagggaaacacggagaaacagacatgaagcgggctggacagtcgaaagaggcgccactcacttcccctgagctctccctcctgcccccttctgtctttgcctccagagttagaaccttccagcaaggcccatcttgaacgccccctctccacgaagcacctgccaaccctcccctcagatctccaggacacacggccctgccctttttgcacttcagctggccatccatgtgaagctgactgtgcctggggctgtggcaggtcagcctgaggccgggagccaggtcacctcctgcggactccctgcaggttctgcaggtggggccaggggcactgagtggctcctgtgccctgagagctctgctggtcactggggatgacccctgccctcagaaaacctctgctccgcagtagagacccccacccacacatgcatctgtgctaagctgctgggggcatggcccccatccctcccctggctgcagcctctgtactcacctcgagtccccttggggcagggcctctccaccagcatgccctgctgggtggccggccactggacccgccgtacctctcggggctcgcagaagagctcaggggacacgtgtagattcggggctgggggccgccgggtgctggggactggggctgtggctggaggcagatcaggtcccagctggttgatggcacccactgggtgcgtggtgaggggtgcccggcggagcggggtggtggctgcgggcgaggctgtgctggtgaggggcgtgggcctggctgtggtggtcgtgctgaggggtggggaagtggctgggcctggagaggggatacgagacagggtcatccccatgctcagggccatgccacagtgtgcttgggcagggggtcccaggccatcttagcatcttcctcatctactgaagtggaaacacgtgccgggccccactgggtctatgagttgatctcccctggccgctctgtgcccaccaaagtcccttatgcccatgggcccatataaagtagcaaagagtggtaaaaatccacgatgtgtaccataaggtctgagagaacggtcaggggagaggcagggacagaggtgtctgggggacaggaatcctcccaggttgagcccgagggcaggagccctccccaatccaggtcagccccgccaccaggtgggggctgaataccaccgccccccatcctcgttctagctgactttggcttatgtaacctggctatgctccttccttctgggggcctcaactcccccttttgcaaacaagatggggttagatcgggctccctggagccctggggtggcacagagctagcagggcagctaggcggggcaaaagaagactgcagagttgccctcagcccggtcagcatcagcagctcagctcttttgtggatactggacttccacccaggattttggtggatccaagggttcctggagtaaaggtgcccaggcccctgggagaggcactgcagttcagtggttgggaggctgggttcaaatcctcaaataacttaatcccctacccacacagagcctcagtgtcatctgtaaaacagggcagtaaggatccctgtgtcatagaccgtgaggagacgagttaatgactgtgaagtgcttagaacagcgtctgtcacatgctgtgaatttcctttacctcccgatccccaagagctcacaggatggggctccccactctgggacccaggggtgggtgggggtggaggggacaaaggcaagcaggctccatgcctggaagtgagtcgtcctcaccagcactggggtcgggcggcccgaactccaggctgtagcgcaccacgaaatagttgttccagacgtacagctggttgtcgcgagggttgtagtcaacggaggagatgaactggtaggggttggggaaggtgaggctgacaggctcctcgcggttggcattggtgttgaaggcatagtccacgcggttgccagccgcctcgctgtcatcatccacgtacacggaacgcaggacgtacaggaccccacacaccatgaaggcgttggatgccgagcgcttgtcgtaacccgtctcccacgtgccctcaaagcgcagtgtgtaggggttcagctggctcaccaccagccgcccgttgttgccctcagtggcgtagatgacccacagcccgttctcgtccaccgccaggtcaatgtcggtctttccgccccagcggtagggcgaggtgtcatggtagttggcggtattgatgaccgtctccccgctcttgatgcgcgtccgtaggtcatacttgacgatgttgcgcgtgcgctccttgttgtagaagacggcaccatcgtagaccacaaagcctgtgccatccacgcggttgggcaggcggtaggtggtggtgtggcgggcggccacgtagtcctcccacgaggcatactcagtcagtgtgtccgtgcggtaggggatccagggcatcacgtagatgcggtcacccgcctgcagcgggtccttgcaccatgcgccagactggtgctctgactcgtgtgtcgaggtgggctccagcaccttctgcagggtccctgggcacacgaagactgggcagagtgggcgggaggggaggaggtaggagagaaggggcagaggcgagagggaggagagagagagagagagagagagagagagagaggggggagagaggcaagttggtcacgctgctggtggggagccaggttgtcccctcctgctgctgcagtcacggttgcttggtatggctggtgatgggaagggggtttccgggctgggacccgaccccctccccacgccctgcccagctgcccctctccctggaaatgtgaaccctgaaggccattaagagcggggttagtgaggggaagtggtgcccctcttcccttccctggctgctagagaccccacaggctggggaggagtttggcaagagccctcccagaggtggtcctgtgtgatttaagtgggggcagaatctccccgctacagtcactcctgactttgacggtccagggactcagcacccggccccttctccctcttctctgccacttagggaagagctagggtccaggatcccatccttcaccaaccacacccggacagtgtttttttttttaactcctctttcttcctcctgcaaaaattgcaaggtagagtggtgtttccatacccactgtgggtgtcaggagtgtctccctattccaggataggggtttcaactctctccccaggttcctgatgcagcctgctccccaccccccacccagtacccacgaagtcagtagccgaggaagggattcccagaggcagctcccaggctaggacggggaatgaaagagtctggcccctcctggagggcgcccagccctgcccccagccggcagggtctctcatggggtctggctcagcagcagacagtggcactgtgcacaggggtgggggtggggacatggagagggacagggctcccgggagagttggggagggagaggagagctgtgcagagggaagagagacaagggcgtatggggcttggcgaggtcctggctccgtgggaggctgcgctgcaaaccacctgggaagaaagggttagtgctggcggaggagagaggggtgagcagagaattcactccaaggcccaggcccgactgagggtccctcaggggggcagtcccaggtccagctcggagggggcaggggagggaaccaggcgctaggataaagacccagcccgccccagccaggccccccacctcccctggcccggaccccgatttacctgcgaccatccccggctcgggaagagggaccaaggcagcgctgatgtcagaaaggtggggggccccgccccacccccccaatccctgaaaaggaggaaaacctcaactgcatctcgttggccactgctggccggcccacccttgcccagtcacgtcccagcaccacctactcctaacctccccttgactgatccgggggtcagtgtggccagacaccccacctcctcccagagtgcgcccctccatccaggatggccgggcctccctcacctcctggctggcagaacccacacataggccagggcgagggcacagggcgagggtggagggtttgcagtgaattctctgctcttgcttggcatgtcaccaaagcagctggccccgaggggatcggggggctgggacctggcaccggcttggggggcagccccagtggcaagaggggcttgggctagtcctcattccccacctccagcaggcttgggagggagggggacaggcagcactcccttcacagcatgggaacaatgtggctcaggggccccctggcacaaagcagccaggatgtagtttttgtagagggagaggagcctgggacatagagctgggcaggagccaaaacgaccctggcttgggccctggggactggccatccccctgtccctgatgccctgaggggtcggcctgcccactctgtccagcacactggcctctgcccaagccggtccccacccccaccaggtgtgtggcatctgaggggacgtgtttgtgtgaaggggacggtgggaggcctcagagcctaacctgctcagagggtgtcaggggggaaaaatgtggttagaggtcaacccaggggaagggggagaagatgaggaagggtctgtctggggccttggacagcaaggacccttcaccagcaccaaactcccaatccctcctcttccctcccttgccccgtcaccccacccgccctgccctggccctcgaagagaaaatctccagtggtgccgcatccaaaccagtgggcctgcaagaagagtggctggtgctgggagggagagagactccaggagaaagagaggagactggaggggtgtggtgagggggcggacctggggccagcagcccaggcctctctgagatgggggagaggggaagacggggaggggagcagctcagagggaccctgccccacctccttcggaagggatgctccacagaccactgtaatttcaaggcaaaagggatccctaaaggccatgtcctccagccctgcctgctgctgccggcctcagatgggtaaatttcccaaaactttctggagaggaaatggtcatccctaacatctcaccctagaagcccctcagcagcagcacctccgctccccccaataacagccagtaatggccagccccatccactagggagttctctgctagaaattacggagtctgtggaagtccccagactgtgcccccgccgcccgccgcccatctccctggtcctctaaccacaacagcccagaagaaaccctgactgcagctttgcaagtgtgaaagaaacagagaacacgctcccccacccttcgctcccccaaccacgaggcccgcccccgccccctcgccctcattttttcattttttggcaggctgccccctcccagggctggggacagctgacacccctccccagggctgggcccccagctggtcagagatggggatcaggttgggggtggggaggactggtgctccatgctccaaaacagctctgggccttggaaacatcaaaccagaaggaacttaagccaccaggagcccgagacataggagaatctgctccccaaaaggaaaacaatggtgtcccctccagcccgcctcccatgaaccagaaacatgttataaaaggtacaggggaaggaggaagagagaggggagagacagagagagagagagagagaaagagagagagagagagagacagctcacccggtgccccagtgggggagccggggaagggagtccctccctccccacccgccctggatgcttatacacttctcctgaaggaggcaaaagaagtatgagaaaaggccaggtcccccgaaagggccagggaccaggaaggagggacagagagagacagaaacagcgagagagagaaaatcctgcccaagctcagagaggagcttccgtgggtatctggagggtggagatgcccgtggccgcaccagggctggtcccactgggaggacaacccagggtgggggataccgaccggaccaagtgtgggttggggagagaagaaggggccgggggagggcaggtcacataagtatggtacaggtagaacaaagtgtgagttaggggttagcattggtaacagtgcgtttacctttctgctccacttctactttaagcatcggaagagagagagaaaacaaattgaaaaaaaaaatgtgcaagaaaaaaagagaaaaaaaaagagattaaattgctttcgtttcttttctggcaacacgcccccttttcctttccttcctcgctcctgcttccccaaccccttccgtagcatcagctcgggcccccgcccccaggtcccttcctctgggggtggtcaggtggggtgagagggtgctggggagacagtcagagggacgagggggacacacacaggagggagaagacacagaaagacacaggggtggtaggggggtacaggcaggcagacagagccctcaggtgggagggggcacccttggtgcaaggcgggggcagggagtagggagccccagctgggaggtgggctccggtcagagggggcaccagggagtggtggggtggataagccactcggctcccttcccaccctgcctgctgccctcctgctagaaccaggggccccaggggaaggatttcagtgtctcccagggcctgggcccaccctcagccaagaaacaggctgaactccttcccctttatgctggcctcacccaggtccagctgacttcccccaagccctcacaacccagaagaagcaaacacagagagaaggtggcagagccagacacagaacgacaggcagacgggcagttgcacccgggccccagagagagccagggttggggagacggaggcagagaggtggcgggggtgggggacacagactgggtgggacagcaagtgggggcacagacacgctcccaggctccccaggggcaagtctgaggctcggcttctctgctcaacccacccagggcccgggggcccaggagctgggagctccgccctgcccgctgccctgcggacgggcggcacctaggggaggaaggggcgcggttagactgtgctcagctgcaaagcaaatccagcattagtcgggcttgtccactgtgtgggagggttcccacacatcacgtgccccctgccacccacccctgacccaccctcaccagcactggggtcacccccagcctctgaagccctgggccaggtggctgcccaggccgctccccctctgcatccctggcccctcaggaacttctgactggagggactggctctcctggcccctctctgaaggttccagcagggagctccgcaggggcagcctctgcctcccttcccagcgcctcacccagggcctggcactcaggagatgctcagtgaacattttggggacaagtgagtgcctggcctccctgtcctctagctacctcctgtccccgctttaactccagcctccttcctctggagcatcaggagttagctctgcccccaacatccaccccgtatgtgtgcacacatgtctgcgcgtgtgtgtgtgtgcgtgtgtctcctgtctccccaagggctcaggctatctctcttccatcagacaggcagccactcatcctctgaactgtcctgccctctgtccctggagcctgcctggtctctgtcggttgtagcccctggaccacgctcagggcctcggctccaggaggtttctcagctcctctcctcccctagcttctttcctgcggcttgacctgagcctctcgtctacttgctttggcttccacctggaccgaggaatttttcctgccctttatctcacctgcctcgggagaagttgggtcattatccgttgttattttaattttgattaccacagcaataatcgtaattgacaagaggcattacaaggagctgcaacaaaagcaacgactaccaagtgtccagcactcacgaggggccagcaactatgctacgcacctcactggccgtcttttgagaaccctgtctacagatgggaaaactgaggcacactgaagtgaggccacatggctggcgaaagcaggcaccatttcctttgcatctacagctcgggtgcacacaagcttgacatgcgttgtcgctactccttgtggcttcccagggaaggcttttgacccctctccaccccatcacagatgaataaacaggctcagctggcttaaagggcattggtaatattactgagcacatcctgaaccaggcatgggtctgggcgctggggcggcgggtgaagacgaagcctctgcccttgggaagtttacactcggcactcaaaaccctgccaccaggagcgactttgtggccggccctgggccaagcgcttctcacatgtcatctcatggactcacacctccttccgtagtggcccagagaaattaaatcatttgctcaaggtttcagagccagaaaactcaagagcccagtcgagccttgaacctacacccatctgactgcccccctgtgctgagctcgctgcctcccaccccccttccccgctgtcccagccgcgggagtcagccgtgtccccagtgctgtggggaggcttcaaggagcagatgggcatccccctcggtggtggctgaaggcctcaagcgctgaaaggaaaggacgaagagtaaaagaagaaaattacggaagcacagaagggatcctgtttccccagcatcgagtcacctgtgaggagaaatcaaaggctggcagggaaggttggggtgggaggggagaggagggagagttacagggcctcttagtccccaaacccggcccgccacactcagacaccctgatggccctgccttctccccactcttcccggaggccctaccaccaggttgactacatggaacccattgtgggaggagaagggaagggataatgggaaggagggagggaggagagagggcaggaaaaaggtgatgtcaagggtggggtgctgaggaggagagaccttgtctttgtctgatccctttggccaggtgcaagatggccaggctcctggctccccaaatcactttcttcaggctgcctggaggccaccctcagtccaacatggcggcatttcctttgcagacaggaagtgccacatggtaatggggagaccagtgaggagctatgaatctgttgaaaatgccccccagcccttcaccctgaatctgccaccaggcctcagaggatggtatcccactctatgggtgtagagtccagcttccatgattgggaagaagtgtgtggggagtgagggtgctgagagaacggtgttgagaggggcagtggggtaagtgagagggaagagaaggtagatgagaagggtcagaaaaggtcagaagagtcagaaaaggaagggatgtgagaaggcgagggaggcagatgggggagaaaagcatagaggccaagggagaagagagagacgtaagtgtgccaggcagagcacgggaccatggcctggcagtgtggaaatgagtatagggtgcatgaagaagcagggtgagtgggctggggtaaggagagctggagaaggtgtccccacaggaggggacagagtctgtgaggcgggggagcaggcactgagtgtggacactggtgtctgggattagagaatgtgtgttggagagagcaggcccggctgtccccactgtgcccaggccccatgcatgtgtgcacatgtgtgatgggtcaaggtgtctcctcctcactcactcatgcgagaagggcccgcatccgcacaaggaacaagatgactcactgtaggggacacagtcgtactgcacctccaggtacttgtaggtcccaggacaggggtcaggaaaggcatccgagccggcgaccaccacgcactgggtgcggttgttacaccttcagaggagaaacagggcattgggaaagaaacacatagacggggtggcgggggtgggggtgcatgctccagggtcatggtgtcatagacacccccaaattgggaaggggcagtggagctggaaaccaagtgatatagtttggatctgtgtccatacccaaatctcatgttgaattgtgatctccagtgttggaggtggggcctggtgggaggtgattggatcatgggggcagtttctaatgaatggtttatcaccatcccctccgtgctgttgagatctggttgtttaaaagtgtgtagcacctcccctgttctcttttcctcctactccagccatgtacggcgtgcctgcttccccttcaccttctgctgtgattgtaagtttcctgaggcctccccagaagcagaagctactatgcttcctgtacagcctgcagaactatgagccaattaaatgtcttttctttataaactacccaatctcaggtatttctttataccagtataagaacgaactaacacaccaagcccagaggacttgtgtgggcactttttgtttcctgcctgctctctctttcccaccagggttcttctattttcagccccagcacagcatcatcctcagggctaagaaggaggagtcacccgctaaacagtgctttcctggccacccctcatctctttcattgtgagtgtagctgacactattatatccttggcatttttctttaaatggactttaaagcccctgcgctgttcactggagagtaatacatgtgaagccatgcacgtgaggtggtgtctctgcaaacttacgatcaatgaaatgttcagtgtccagctgtgtccacttcacaccatctcgtggacacatcccaccctttgggcagtgctgctgtgcagacttatagccagggcagccaggagagagcatccccaggggaaagccattctcggttcccaagaggcaactcctccaagtcactgtcaacttcccagggggctggctagcatgtaagggggaacctatttaacaaaaaggtgtgtctcatctgctgtctgtccccactgtcagggtctctgtcccttgcagcaggctggggctaggccaggcaggacacgggcatgcaggacatagtttgagaggcttcccgacaggtatggggcagaagaggccctgtgtctccccttcaatcctgctcttaaccaagggtactaaacacaggcagacacttgagaagggactaaggatctagcagggagagagaaaaatggggggcaggatggggtgtgggaagatctgtctgtatccatccacctcatcctcttctttaaaaatagaacactggctgggcgtggtggctcacgcctgtaatcccagcactttgggaggccaaggcgggtggatcacctgatgtcagaagtttgaaaccagcctgaccaacatagtgaaaccctgtctctactaaaaatacaaaaactagccaggcgtggtggtgcatgtctgtaatcccagctacacaggaggctaaggcagaagaatcacttgaacccaggaggcggaggttgcagtgagccaagactgagccactgcactccagcctgggtgacagagtaagactccgtctcaaacaaaacaaaagaaaacaaaaaatagaacactggggcagggtgcagtggctcacacctgtaatcccagaactttgggaggccgtggtggatggatcacttgaagccaggagcttgagagcagcctggccaacatggtaaaaccccatctctactaaataaacaaaaattagccaggcgtggtggggcgcaccggtaatcccagctactcgggaggctgaggcccaagaatcgctagaacccaggaggcagaggttgcagtgagccgagatcgcaccgctgtactccagaagtagacaattcatacattttaagttgtgtgctgttgtgagtagcctgatgaaatctcatgctgtatggggcgtgtccatgctgtatttgctccctgtctgttagtcactagtggtcatctcagttatccatcaactgtcacggtttcacagtgcttatgttcaagtagcccttagtttatgtaacaatattttactactaaaaattattattgttgttgttagtctctcactgtgcctaacgtattttattattattatgttttgagacagggtcccgctctgtcaccgaggctggagtgcagtggtacaatcttggctcactgcagcctcggcctcccaggctcaagtgatcctccagcctctgcctcccaaggagctgggactacaggtatgtgccaccatgccctgctaattttttgtatttttagtagagatggggttttgccgtgttgcctaggctggtctcaaactcctgggttcaaacaatctacccgtctcgacctcccaaagtgctgggattacaatcatgagccatcacacccagcctattttattttattattttttagacagggtcttactctattgcccaggacggagagcagcggtgtgatcatggctcattgtagtctcgacttcccgaagtgctgggattacaggcatgagccaccgcatctagctgtgcctaatttgtaaattaaactttattataattagagctgtataggagaaaacatggtatatacaaggttcagtagctctctgcagtttaggcatccactggggttcttggagcgtttccccagtgggtaagtggggattactgtacccaaaagaatttaaaacaagtgtttaagcaaatcgttgtacacgcacgttcacagctgcattattcacaatcaccacaaacgtggaggcagcccaaacatccaccaacaaatgaacagctaggctgggcgcagtggctcatggctataatcccagcactttgggaggccaagactggcagatcaattgaggtcagaagtttgagaccagcctggccaacatggtgaaacgtcgtctttactaaaaatacaaaaattagccgggcgtggtggtgcatgcttgtagtcccagccacttgcgaggctgaagcaggaggactgtttgaaccggaaagcggaggttgcagtgagccgagatcatgccactgcactccagcctgggggagagcaagactccgtctcaaaaaaaaaaaaaaaaaaaaaaaaagagtctccaggcttggttgtggagcagtgggggttggggactcagcggagaggaagcaggactaaggccccctacaagtccttctggatgtgactccagaggcctcatcacactccctcagccccggtaactattctgcacagcattccccacggacatgggaactgggccagatgctgtactaggtgctagagagataatggagaagaatgcagtcccccaaagctggtgttgaatgaagtcagcagggagaatttggagaggtgggaggaagggggctcccagggagggggcccacagcctaagcaaaggctagagcctggactgggaatgcctatgcagggcaccctcggcaggggtgtcaggggacaggaagcggggaagagaggcaagattgctggaggggaatggcagtttgagagagaggcagagaggaggagatgatgaggtgcctccagcccagcccagcccagctatctcagccacctgaacactgtcatcccctgcccaaacctctcctgctctcctggggctctcagtgacccgctcctcccctggtaacacacattttttttttttttttttgagacagagtctcactctgtcacctaggctggagtgcagtggtgttatcttggttcactgcaacctctgcctccaaggttcaagcgattctcctgcctcagcctcccaagtatctgggactacaggctcacaccaccgtatcaggctaatttttgtatttttggtagagacagggtttcaccatgttggccaggttggtctcgaactcctgacctcaagtgatccacccgccatggcctcccaaagtgctgggattacaggcgtgaaacactgcacctggtctgtttttttttttttttttttttagagacagggtcttgctcagtcacccaggctggagtgcagtggtgggatcatagctcattgaagcctcaaactcccgggcccaagtgatcctcctgcatcggtcatctgagtagctgggaccacaggcacacaccatgactggctaatttattttttagtttctagtagagacagggtcttgctatgttgcccagtctggtctcgaactcctgacctaaagcgatccccctgcctcagcctcccaaagttctgtgattacaggcgtgagccaccgcgtccagcctgggtgtaatttgaaggaaaggctgatcagctctacatggactgactgtgggtgtgagagaggcttgtgcagatttgcacacgtggtgcctcagcctggggcaacccctccacgctcacacaatcacaaacaactcaaagaaatacaaatacactctcagtcaaccacacacaaaccctcatccacatacacacatctgcccacagacacagttaaatacacaaagacacagccacacccacccacccccacacacgtgcacccatccacctcaccactcacagatatgaaaacacacacctcagtcagccacacccgctcacacacatgctcacacccacacccgctcacgtacacttaaacacacccaaatacactcatataaccacatattcacccacaaacacccacattcacacacacatccacccacccagatacacactccaatacacactcatacagacacactcagacacactcaaagacatgtttagtcacacacatctgcacacacctacacctgttcacatacacttagacacacagacacacttagtcacaatcacacacatttagtcacacactcaaaaatgcacacatactcacactcaaatacacacacaggccaggcgcagtggctcacgcctgtaatcccagcacttaagggggccaaggcaggcaggtgaatcacctgaggtcaggagttcaagaccaacctggccaacatggtaaaaccctgtctgtacaaaaatacaaaaataagctgggcatgatggtgcgtacctgtaatcccagctactcgggaggctgaggcgggagaattgcttgaaccctggaggtggaggttgcaatgagctgagatcacaccactgcactgcagcctgggcgacagagcaagattctgtctcaaaaataaacaaaacaggccgggcgcagtggcttacacctgtagtcccagcactttgggaggccaagtgggcggatcatgaggtcaagagatcgagaccatcctggccaagatggtgacaccccgtctctattaaaaatacaaaaaaattagcttggcgtggtggtgcgcgcctgtagtcctagctactcgggaggctgaggcaggagaatcgcttgaacccaggaagcggaggtggcagtgagccaagatcgcaccactgcactccagcctgggtgacagactgagactctgtctcaaaaattaaataactaaataaaataaaacaaatacaccgtcatactcatagatgcatgcaatcacacagacacactccaagttacagtcttgcatgctcaagcattcaccccacacacaatcactcacacaggcctgtgcttctatcatctgtgctcaggtgtctcctccttggagtagcctgatgagctctcaaatctgggatgggtgggtgcggtggctcatgcctgtcatcccagcgctttgagaggccgaggcaggaggattgcttgaggccaggagtttaagaccagcctgggcaacatagcaagaccctgcctctacaaaaaataaaataaaattagccaggcatggtggcaggcgcctgtagtcccagctactcaggaggctgaggcagggggattgcttgaacctgagaggtcacagctgcagtgagctgtgattgtgccactgtgctccagcctaggcaacagtgagaccctatcttcaaaaaaaaaaaaagagtctgggatgaagggaaaagtcctcccatgacaccttcgctctgtcctgctgttctttatattttacaagctccaaactgccctggctaaggctgggtgtgatggctcatctcatgcctgtaatgccagcactttgggaggtcgaggtgggcagatcacctgaggtcaggagttcgagacctgcctggccaattacaaaaccctgtctctactaaaaatacaaaaaaattagtcaggcgtggtggcgtgcgcctataatccccagctacttgggaggctgaggcagaagaatcgcctaaacccaggaggtggaggttgcagtgagctgagatgccaccacgctccagcctggtaacagagtaagactccatctcaaaaacaaacaaacaaactgccctggctaatcttgggatggaagttatggaagcaagaggctggtggggggagggacttcccagtgtatgtatgggtataggcctctgtcgggggcacaggctggctgtggggagatgtactgggtcttattctcgtctgcatggggcccagcacctattaagtgctcagtaaacatgtgttgaatgcataaaaaaaagatgtaaggtgaacgggtgtgctggcaggtgtgcagtgcttttaggcgggcacttcatccaggaactgccacgagagcccactcacctctgtgacatgatcttgaaggcgtccggcaggtagcactgcacattctccatctggaaagggtcagcatcgcaaatcttgtcgtccgtgcgcccgtagttggcattctccaccatgatgacgtcgctgccggggcaccgcagctcgatggggtagccttcacacgccagctcccggcgcatcagcccgaacgggagcccggcccggctcaggcctgcagggagggttggggatggtgtcactcctgggcctgggccaggaagggaagaccctacccactgccaagaaaacaccacctctggctcggctgtgtcctggaagccagctgaggcagcctcagttgattcagctgtagaatgggcctctcagtgtgcccacttgtgtagtgaggacattaacctggcccagagagtgcctggactctcagctcctaggaagtgacgtctgagcctttggaatgctctgcttgataagagtgactgttttcctggggtcctcgggctacaccagatatgctgttatggattgaactgtgttcccctgaaaattcatatgctgaagtcctaacccccaggacctgaaaatgtgacattatttggagataaggtctttatagagataaattcaaatgaggctattagggtaggccccaatccaatatgactgtggtccttataaaaacgggcaattttggccaggcacagaggcacacacttgtaaccccagcattttgggagacagaggtgggcaaatcgcctgaacccaggagtttgagaccagcctgagcaatatagtgaaaccctgtctctaccaaaaatacacaaattagccagacgtggtggcacacacctgtagtcccagctactggggaggctgaggtgggaggatcacctcagcccaggaggttgaggctccagtaagccatgattgtgccattgcactctagcctgggcaacagagcgagaccctatctcaataaaaaaagagggggtggggcgttgttgttaagataggatcttcctctgtcacccaggctggagtgcagtggtgcgatcatggctcactgcaagtctcaacctcctgggctcaggtgatcctgcctcaacctcccaagtagctggaactacagattcacgccaccatgtccggctaattttttacattgtttcatagaaatgggtcccttttctatgttgcccaagctagtctggtctcaagcaatcctcctgccttggcctctcaaagtgctaggattatgggcctgagtcctcgcacctggctaaaaggagaaatttgggcacagaagtgtacagggggaagacaatgtgaagacacaggagcaggcggccatctatctataagccaaggagaggccaggcgcggtggctcacacctgtaatccccgcactttgggaggctgaggcgggtggatcacctgaggtcaggagtttgagaccagcctggccaacgtggtgaaaccccatctctactaaaaatacaaaaatcagctggacgtggtggcatgtgcctgtaatcccagcgacttgagaggctgaggcaggagaatcacttgagctggggaggcagagattgcagtgagcccagatcgtgccactgcactccagcctgggtgacagagtgacattccatctcaaaaataaataaaaaataaaaaaaaaataggtcaggcacggtggctcacgcctataatcccagcactttgagaggccagggtgggcagatcatgaggtgaggtgattgagaccatcctggctaaaacggtgaaaccccatctctaccaaaaatacaaaaaattagctgggcatggtggcgggcacctgtagtcccagctacttgggaggctgaggaaggagaatggcctgaacccaggaggcagggcttgcagtgagctgagattgcaccactgcactacagcctgggcgacagagcgagactccatcaaacaaacaaacaaataaatgccaaggagagaggcctcagaaggaaccaaccctggctgataccttgacctcagacttctggcctctgcaactgtgagacaatcaatgtctgttgcttaagacacatggtctaggccgggctcggtggctcacacctgtaatcccaggactttgggaggtcgaggtgggcgaatcacctgaggtcaggagtttgagaccagcctggccaacatggtgaaacccccatctctacttaaaaaactacaaaaattagccgggtgtggtggcaggcacctgtaatcccagctacttgggaggcgaggcaggacaattgcttgaacccaggaggcggaggttgcagtgatggcatgcagagatcatgccactgtactccagcctgggcgacaaacaaagacacatggtctctggtactttgttagggcggccctagttaatgaatatgctaacaggacttggggcaggagctttgggtcacatagtctcagctgacttctagagatgctagagattcagctcagccctgtaggtggtctatcagggctacagagtacagaactgagctccaatacaaaccctggataacaaggcttgggggagcctctatggttggcagtacaccatgtgtgttgtcacacattgttgccgggagagttaacactgtccaggactccactgaagggagtaactggaaactccatgcatggaactttcttggactctgccctatgcacctcttcccttgcctgacttctatttgttttgagacagagtctcgctctgtcacccaggctggagtggaatggcgcgatctcagctcactgcaacctctgcctcccaggttcaagcgattctcctgcctcagcctcccaagtagctgggattacaggcgcctgccaccacaccccactaatttttgtatttttagtagagacggggttttgccatgttggccaggctggtctcaaactcctgacctcaggtgatccgcccgcctgagcctcccaaagtgctgggattacaggcatgagccaccacgcctggcctgtttgttttttcagacagggtctcaccctgtcaccaaggttagagcacagtggtgtgatcatagctcactgcagcctcaaactcctgggctcaggggatcctcctgcctcagcctcccgagtagctgggactacaggcacataccaccatgcctggctaatttttttttattttttgtagtgatgggggtacttgctatgttgcccaggctggtctcaaactcttgagctcaagcaatcctcccaccttggcttcccaaagtgttgggattacaggagtgagccagtgcacctggccctgattttaatctgtatccttttgatgtaataaactgtgagcaaattagccgggcgtggtggcaggcacctatagtcccagctactcaggaggctgaggcaggagaatggtgtgaacctgggaggtagagcttgcagtgagccgagatcacaccactgcactccagcctgggcgacagagcgagactccatctcgaaaaaataaataaataaaaaataaataaactgtgagcataacatctagttagttccaagtccttctagtgaatgatcatacctgagtgttctctgggggacccccaaacttgtcattggtgtcagaagtgaggcttggcttggggacttccctaacttcaccccaccccatgcgaggagcagagaaaacatgggaatgaactcatgtttctagaagaaaccatagagactggctttgccgctgacagggcagatgtgaagtctggttcagaatgcagattcgggccccatactcggcctgctggatcaaaatcccaggggtgaggccaggagcctgcagggctatgtgccaaccaggtgatggtgatgcatgctcaagttcgaacagtggctgggcgcggtggttcacgcctgtaatcccagcactttggaaggccgaggtgggtggatcaccagaggtcaggaattcgagactagcctggccaacatggtgaaaccctgtctctactaaaaatacaaaaaattagccgggcatggtggcaggcggctgtaatcccagctactcgggaggctgaggcaggagaatcgcttgaacccgggaggcagaggttgcagtgagccgagatcacaccactgcactccagcctgggcgacaagagcaaaactccatctcaaaataaaaacatttaaaaagtttgaacagccaccgttcttctttccccaagcctcagtttcccaatctgtaaaatgagcacctacagccccgggtcatcctgcagggatcctgtgccttagaaaatgctcttgaaggaaagcactgagcatggcaccctgcacacggagggtgcctgatcagtatcatctggtgaacctccaaggatttcactgtgacaaggaagggacatgttctgagcaggctgagctccctggggggattgcgttgccccatgttggtcatcaccttgtaccacacggggatggagaactagaatgtaggagccagacagatggctggggttggaattccagcccggccactccctggctgcagcctcatccaagtcactgaccgcctctgtgcctctgtccctcccctgaggggcagagaggacaattcccatctcacaggactgttgtgatggctccagggtgttaatgtgtgcagagcgcagtgagatgatatgaatgctaattattgttattatgaatattattaaggcggtttgtctgcacaacagagggtgcctggcagggtccatgctggccggggcagcaccttctgtgacgctggttccagccaggccctgcggggtgctggagggcagcagggattcagccagggacccagatgccccaatgtggggaccgtcgcttgtaggtgaaggaagtgaccacctgctgtacgaggtttcgggagggcactcgtgcgggacggtgacagagctgagcctttccagagatctgggtgggtaccccaggggtatggcagggaggcccttggggttttttggggtgagttgagtcccagcggggggaacatttcacatgtgttcctccagcaccatctgcctcctcatctaattttagccttcccgggcttgggagggagggccgggggtggaaggctggctcagatgggtctgggggtggaggcagccctcccggcccagctggggctatggggcaggacctggatgggcagagaacgtagcagcagaggagtgaggttgctggccagcggggcagtgccaaggccctggggcccagctgaaccgtgtcccttcaacctttggagctttccagagggcagggccagagggagcagagtcacccgccaatgcccttcatacagggatgtcggggtgggcagggggcacatcccagagtgaggggccgggcctactggcctcttctcttggcctctcaccttatcccgcccttgcccccggcctgggctggtcacggggccagtaatcgagtaatcggtgagggtgggcgggcaggcttggggcactaatagtggcgtgtgcaggatcctagggccggcatagggccgagccgggtaattagttgtttttaaataaacgtcagcgggcatgctttaattaagccttcttcccagtgagagcctcgaagatgtaatcacagagagagagagagagagagagagcgagagagagacagagagaggagcatcggctcaccaagaaggcctgtcctggtcccaggggccacagcgggatggcccctaccaacctggcccagccgacttgttggaggtaagaggatggtccaggggcctcttggtggcactggggtgtgtgttacccctgagtcttccactggcctgctccagctgaggtctggggcggggcagggggctgtaattctttactgagtgatcaggagggttttcaacattttatctgccccccccagaagggtttgggagccgcggcccctccccggccccagcagcacctaccttgggtggccgaggtgaccaggacggcggtgacacacagattccagagcactgcggctaggcgggccatggtggcagccgggtgcgtgtccggagctctcagtggcctgtgcggggggctttgccccacatcacctggcaggcaccacggcctggaccaccagcctgggggaggacagggagactgaggtggggatagggcctccaggccgctcccctctcctcctgctggtggctgagtagctctgagaggctgaggtccagcacgtccctcgagccagccctatctgtagggccccctccggggtctgcagctcacaccacaccccccacccttacacccagcagccagacccagctatctgggcacctctgggcaaagagactgccaactcttccccactggaacctcctgggacagctcacggggagatcccaggcaggccttggaccctctggaagcctcttccccatgcccctgtcctgaccctgcccactcatctcccctactcgcatcctcaccatgagcaaggaggtaatgagtgtcctcccaagtgagggactcattgcaacccaacttgcagcctccccgtcttgggcagaaatccaagcccccgcccccagccccctgcttcctgtctctcaagctctggtggctaattagaatccagctggcgccacagatcgggaaccagggacgcccgagtcccctctttcctctctgggggaccttcagggtaagctggagacaggcaggcggggtgggaggcggacactgcctccccctctgggggggccaggggagatgggggaggggtgagaattgtgtgctgtcccctgccatcctccccacctgctctgtccccaggcacagcggctcagttttttttttcattattattatttttttaaattttagaaaccaggtctcactctgttgcccaggctggagtgcaatgatataatcacagctcactgcagcctcaacctcccagactcaaggaatcctcccacctcagcctcccaagtagctgaaatcacaggcttgcaccactaccaccagctaatttttattttatttatttatttatttatttatttatttatttatttatttttttttctgagacggagtcgtgctctgtcccccaggctggagtgcagtggcacagactcagctcactgcaagctccgcctcctgggttcacgccattctcctgcctcagcctcccgagtagctgggactacaggcacccaccaacacgcccggctaattttttgtatttttagtcgagatggggtttcaccgtgttagccaggatggtctctatctcctgacctcgtgatccgcccgtctcggcctcccaaagtgctgggattacaggcgtgagccacagcgcccagcaccaccagctaatttttaaatttgctgcagagaggaggtcttgctatgttgcccagactgatctcaaactcctgggcttaagggatcttcctgcctgggccccccaaaactttgggattacaggagtgagccactgtgcccagtccaggactcggttctaactggtttcttcctgccttatggctgctccttctcacctctctccccgcctcagtctccccaaatcctctcaggcttgcacgctcaaatgtctgtcctcagctctttgctttatctacaccctggttctccaggtgtggtcccagcacactggcatcagccttgccaggaacttggtagaaacacacattctctctctctctttctttttttaagagacagggtcttgctctgttgcccaggctggagtacagtggcacaatgacggctcactgcaacctccagatcctgggttcaagtgatgctcctacttcagcctttcgagtagctgggaccacaggctctcgccaccacgcccagctaattttaaaatgtcttatagagacaggatcttgctatgttgcccaagctggtcttgaactcctggcctcaaatgatcctcccacctcagtctcccaaagtgctgggattacaggcgtgagccactgtgctggccagaaacacacattctctgaggcaggccctgaagcgtgggaacccctgctctgtcatatccagctgtcatcccagcctgtcccatctcaggctgtcctgggctctcagtaccatcattgagccagcactttcaaatctcttatgtccagcctggaatctctcatcagagcccccactaccatttccctgctgaaaaccaaaacccttgtaattggcccagttagctccctgaccccatttctgctccagccactcctgctattcctggaccacagcaggccttgccccagggcctttgcacctgttgcttcctccacctgtagcttctgccaacccactgtccacatggctggctccttcaggcctctgctcagatagaactattcacctggtgtatagaatgtcctcttcatggggcagggatcattgaactgttttgctcatggtggccgtatccccaacttttatttacttttatttttttagagatagggtcttgctctgtcactcaggctggagtgcagtggtgaaatcatggctcactgcagcctccacctcccaggctcaagtgatcctcccgcctcggcctccctagtagctgagaccacaggtatgcaccatcacatccagctaatttattttattttgcaaagatgaggtcttgctatgttgcccaggctgaacatgaacttctggcctcaagagatcctcctgcctcaacatcccaaagtgctgggattactgcgtgaggccatcaccactgttgtcttcatatcctcaacttttagaataggcctggcacgtggcaatgaattaattatttgttgaatgaatctcagatcccaaagctgagactctgccttgattcctcaccttccctgtcatccccctcacggaagccatcagcaactcctgtgggctctgcctctgaagtacctcgcgacctgcccacttctggctctaagcacagcacccaggcccatgcaccatcctatgtcacctgtatgttgtcctggcctccttgcccgcctcccaatccgcccttcactcagagctaagggaccacatgatgatgttgatccgaacattaactgaccccctggtctctgctggggtctcagttcctcactagagcccagaggctgtgggtgaactggtgccaccaagctctccaagccccattctgtcctccctcctgttcctgaaacattcaacattccagttccagtccccaagcaggatccctgcatgtcggctgcggctgctcattgttcagggctcagccgcaaggtcaccccagcagagtgacctaccctgaccccctgcaaacaaaacagtcctcgcctgctgccctcacccgccatccttttccctgtttttaattcacagctctcaagtgagcacctgaaattacctttttatcaacacgagcttcttgagagaggcccttacaaatcagcacacggctgggcacggtggcccgtgcctgtaatcccagcactttgggaagccgaggcgggtggatcaccagaggtgggagttcgagaccagcctggccaacatggtgaaaccccatctctactaaaaataccaaaaaattagccgggcgtggtggcgggtgcctgtaatcccagctactcgggaggctgaggcacgagaactggttgaacctgagaggtagaggttgcagtgagctgagattgtgccattgcactccagcctgggcaacagagccagactgtctcaaaaataaataaataaaacaaatcggcacaggccctcaataaataaagatccccacagggcaggacacctggtccagaccccagtctcctcacgtgggaaatgggaagataatatctgcaagacagccctgaacaccccctctccagccctgtagctctctgcccgcttcccctctcatgcccactcccgataccagctccctctccactgccccagcttcttcagtaaatcccccccagctacctccagcccccaaccgcgtctccccccacatccctgactagacacggccagtgtcactttcagatgattttacagcgtgttaccccgccgccgccaccagcccctatccgcatctcccccacatctgtgactagacatggccggtgtcactttcaaatcattttccagcatgttaccttgggaatggggagtggcttccttatttcaacttcctcatttctcccccaactgcccagccacagaaaggttcaggggaggcagtgtccccaagctgaggatactcccctcccagggtctccaagcgctttctttcccactgcaacaggcatccgagcagaggaactggttagagggagtaaaaatggctggcttggtacggtgactcgtgcctgtgatcccagtgctttgggaggctaaggtgggtggatcacttgagcccaggagtttgcaaggctgcagtaagctatgatcctgccactgcactccagtctgggcaacagagcaagaccctctcttaataaaaataaataaataaataaatggcagggaagccactcgatgccaaattgtgtgggcagcgaatccacatgggtctagatcccaattttgccttatacatgccctgtgtgaccttgagctggtctcctcacctccctggccctggttccctctgcgctgctattctgcagggttctggtaaggagagcagtacacgtacacgctgggccaatacaggccccatcagagggtgctgtgcacagcctggtgccagtcagggcacaaagacacccacggaagaggcagtccctctcttcctcccaggctgcaccctagaatgctaagactccagagtggaccccccagagccatgtatacttccaccgggaactccaaggcaccttcagcccaaccagaccaaaataagcccctacatcagtgcacggtgccaccatcctcccaggccctccagccagaaccccaggagctgaaacccttgactcctctctcacccctaaatccagttcaagagtaagtctttgggctgtgtatacttccagaacaccccagtgttggtccacacatctgtcttcagcatctgcccctctagtcctgggccctggccactccccaagtgccctctggctcctttgcctccgacgtccaggctctcctggcagccagaggcaccacctccttttttttctttttttgagacggagtctcactttgtcaccggggctggagtgcagtggcacaatcttggctcactgcaacttccacctcccgggttcaagtgattctcctgcctcagcctcctgagtagctgggattataggcgcccaccaccacgagcagacacggggtttcaccatgttggccaggctagtctggaactcctgacctcaagtgatccacccgcctcggcctcccaacgtgttgggattacaggcatgagccatcgtgcccagcctccaaaacttttttatcaccccacatagaaactccgtacccactaaacaataatgcccactccccttgtcgcccagccctggtaacttataatctactttctgtctccatggatttacctattctagacatttcatacaaatggagtcacaggctatgtggcctttttttttttttttttcccagttagatgggggtctcactctgttgcccaggctggagtgccgtggcccaatctcggctcactgtaacctccacctcccaggctcaagtgattctcccatctcagcctcctgagtagctgggactatagtcacatgactcctctaaatgaactcctggctaacttttgtattttttgtagaggcaggatttcgtcatgttgcctaggctggcctcaaactcctggactcaagtgatctgcccatcttggcctcgtaaagtgctgggattacggctgtgagccaccattcctggccttattttgtgtccagcttctctcactcagcgccacgtttccaaggctcacctacgttctagcctggatccgagcttcattccgttttatggctgcgtagtattccactgcatgggtggagcacgttttctttatccagtcatcggtaatggacatgcgggctgttgcacagaaggatcctttttattttctccctagctttgctgaggcatcattgacaaatagaaattacatctatttaaggttacatgatattttgatatccattatgtgttgtgaagtgattaccacaaccaagctaacaacacatccaacacctcacctagacacctttctggtgtgtgtggtgagaacacttgagtctaattcctcagcaagtttcaagaaaacagtatgctataataattattattattttgagacggagtctcgctctgtcacccatgctggagtgcagtggcgcaatcttggctcactgcaacttctccctcccagttcaagcaattctcgtgcctcagcctcctaagtggccggggctacgggtgggcaccaccgtgcctggttaatttttgtatttttagtagagatggagtctcatgttgcccaggctggtctcaaactcttgagctcaagcaatctgcctgcctcggcctcccaaagtgctgcgattataggtatgagccgccacacctggcctgctattattaattatagtcaccatgctgtaccttaggtctctggaacttttttcttttagagatgaggtcttgctctgttgcccaggctggagtgcagtggcaccatcaaagctcactgtagcctcgaactcctgggctcaagagatcctcccacctcagccttccgtgtagctggaattacaggtgtgtgccaccatgcttggctgattttaaatttttttgtggagacagggtcttgctatgttgttcaggctggccttgcactcctggcgtcaagcgatgctcccgccttggcctcccaaagtgctgggattacaggcacaagccattctgcctggttaaaacgtgtttatctgaaagctgaaagcttgtaccctttgacctacatcccccgccttcccctgtgccctcaccaccataaccactgctctactctgcttctacgagttcaattcttttttagattccacagataagtgaggtcatgcactatttgtctttctgtgtctggcttatttcacttagcataatgtcctccaggttcatccattccagaggggtgttttaaaagacaatcttggccgggcgcagtggctcacgcctgtaatcccagcactttgggaggccgaggagggcagatcacctgaggtcaggagttcaagaccagcctggccaacatggtgaaaccccatctctattaaaaatacaaaaattagccaggtgtgatggcggggacctgtaatctcagctactcgggaggctgaggtaggagaattgcttgaacctgggaggcagaggttgcggtgagccaagatcacgccaccgactctagcctggccgacagagcaagactccgtctcaaaacaaaaacaaaaacaaaagacaatgttgagtggtgggtcttctgctttaacccctccaacacctctgactcccgccttgtctccctccagccatgcgggttcccaccctccagcctcagcctgtccccatctgtgtccctcagactcagaggtgtcctccccagagacgcagacatgggcctctgccaccctgtattacagtgccctgcagtcaccgcctgcctgtgcatcccttgccatgctgtgacctcttgtgtctctgttttcttcttggtaaaacggggatacctcagagggcagctgtgcaacaggacaaattcacacacgagacactcgggatgctcctggcacacagacagggtgaagcatcccttgtccccattgtcaccttctctattagctcgggctgccataacaaagtgccatagactgcgcggcttacacagcagaaatttacttcctcctagttctggaggccagaaggccaagatcaaggtgccagcgaattcagtttctgtggaaattctcttccgccttctcactatatcctcacagggcctcttctctagacatgcataaagggagacagatccctgctgtctctctctttttttttttttttctgagacaaggtctggctctcttgctcaggctggagtgcagtggcacaatcccggctcattgcagtctcaacctcccaggctcatgggatcctcccgcctcagcctcctgagtagctggggctacaggtgcgtgctcctgtgcccagctactttttcgattttttttgtagagatggggtctcgctatgtcgcccaggctggtcttgagctcctggcctcaagcgatcttcctgccttggcctcccaaagtgctgggattacaggcatgagccacaagcgccggcctctctcttcttattgggataccagtcctctgagagtagggggccccacccttaagatctcatttaaccttaactacctccctcaagggcctacctccaaatacactcacgctgggagtcagggcttcaacctctgcatttgggagggaggtgggaagatacaatttagtccataacctcatccatcccatccctgctccatacttttacttgaccactcctagagttcctttattttattttatttatttatttattttttgagacggagtttcactctgtcgctcaggctggagtgcagtggcgcgatctcggctcactgcaacctccacctcccaggttcaagcaattctcctgcctcagcctcctgagtagctaggattacagtcacacgccaccacgcctgcctaatttttgtatttttagtagagatgacgttttgccatgttggtcaggctggtcttgaactcccaacctcaggtgatccacctgccttggtctcccaaagtgttgggattacaggcgtgagccactgctcccggccttttctttgttttgttttgagacggagtcttgctctgtcgcccaggctggaatgcattggcgtgatcttggctcactgcaacctccgcctcaagtgattcaagaacctcgagtgattctcctgcctcagcctcctgagtagctgagattacagtcacaggccaccacacctggctaattttcgtatttttagtagagacggggtttcgccatattggtcaggctgctctcgaactcccaacctcagatgatccacgcgcctcggcctcccaaagtgctgagattacaggcgtgagccaccgtgcccagccttctagattttctttctactcccagaagaatggaaactcctgaggctggaacttggtttccccgactcctgtctcctggttccctgaacacacagtgggtccccaagcaaaaacttactgaagacaggggagtgactaaggacggcagtgaggatagctggagatggggcgtctgccctgtgacctgggggaccacgcctgacccccacaggcagggtgccattgccttaggggtacagacagagttccccaggagcacgacgccctctccccagagtggctcccctaggaagctccagacacccccaggaaccagcctcagcttggcaggtggtgggtgtcccccgggagacccaggcctgaccatccctgaggcctctggagggggaggattgaaatatggccccccgcccccaccgccaaaaaaaaaaaaaaaaaaaaaactcaggctgggcacagtgcacagtggctcacacctacaaccccagtactttgggaggccaaggtgggaggatcacttgagccctggagtttgagaccagcctgagcaacatagtgagaccccatctccacaaaaaacacaaaaattagccgagcacggtggcacgtgcctatagtcccagctactgggaaggctgaagggggagggttgcttgagcccaggaggttgaggctgcagtgagctctgattgcaccattgcattctagcctgggcaagagagtgggaccccatgtcaaaaatacaaaagatatgttgaagtcccaactcctgataactcaaatgtgactgtgttgggaacatctggagtccttacagagataatcaagttaaaatgaggtcattagtgtgggtcctaatccaacaactgacgcccttatacaaaggagaaacctggacacagacatgcacagaagaccatgtgaccatgaaggcagagatcagagtgatgcttctagaagccagggaagattgccagttaatgaccaaaagaagccaggagacaggcctgcaacggattctgcctgaaggctcccagaaggaaccaaccctgacaacaccttgatcttggacttccaacctccagagctgggaggcgacacaattctgttgttggctgcagtggctcacgcctgtaatcccagcactttgggaggccaaggcgggagaattgcttgagcccaggagtttgagaccagcctgggcaacacagtgagaccccagctctacaaacaaatataaaaaagtagctgggcatgatgggatgcacctgtagtcccagctgctcgggaggctgaggctgcagtgacctgtgatcgcaccagtacacttcagcctgggcaatagagcaagacctcatctctgaaacataaacaaaaaaaccaataaagtctctgttgctaaagctgtcccgtctgtggtaatttgttgtgggagcctaggaaattcatatagggagtcaggacacaaagagagtgaggagggaggcagagatgggggcaagggcctgagccacagaactttaaagaaaccatttacaggaaacagcaaacgacagggtgagcatctagctgggctctccagcaaggaaccacctgagatgcctgggacagtgacggacagctccaagtgccagcccgagcagcttccacgtgtaactcatgtaatcctaataaccatttaggaaggagagatgcttgtacccacagtttacagaggaggaaagtgaggtcctgtcattgaagagatatacccagggacactcaactggtaagggggcttgaacccagggagggctggctccccaggttgggcttggtgagctgtggggggatcctggggggccagaagagcccccacccccgggcccacactgtatttgagtgtctatgcaacctcagagctggtcacgcctggacgttctacacctgggaagccaggtgagcccacacctgtgtccgtccccaccttgcacctcagtagtctctggtcaccttatttgtctttcttttttctttccttctttcttctcttttttttttttttcctttgagacagcaggatcttgctgtgtcgcccaggctggagtgcaatggtgcactctcagctcactgcagcctcatcctcccaggctcaagtgatcctcccagctcagcctcccgagtagctgggactacaggcacacaaaaccatgcccggctaatttttgtgttttttgtagagatgaggtttcaccatgttgcccaggctggtcttgaattcctgggctcaagcgatcctcccgcctcagcctcccaaagtgctgggattacaggtgtacccaggaatccattgcacccagccataggcgaccctatctcacccatgggaaacggggctgcacacctgcctgtatgttcgcatctaagccctgcgtctgtctcaagtcaagggtcggtgcggcagggtgggccactgaggcccagactctgtcctcgggtgccctgtgatggggatggggagagcaacaggaggagaagcggctgctgggggagagggggcgcctctagcctgccctagcctgcagttgccatggcaaccctctgcgtgctcgagtgggtgggagtctgagtgccttgggtggggggtgggggaaccaaggtggggatctgggatctgggcccccttcatggtctcctcccttcctggcagcagccggcccctccacacacagccctctggctgcatctcctgcctcctgcccactccccaaacccagccgcccatgagcccgcctccttcaggaagccctcaggcatccggcaggtccataaggaagccgcaggccctggggtgactatgaaggatcagctgagagttgaagcccctgaatttcaatctgctgtgtagcttcagagcaagcacttggcctctctgaacctatttccccattgctgctcagggactaacagacctacctcgcagagacagagcacgtgcccagagagggcccaggtacatgatcctcgggcagggcagggttctcacagcatctccagtccctgccccatcctccagctcagtggatggcagcccagtccctccaggggctcaggaaccggacagtcatcctggatccctctcccctcacatcacatccagccccgtcaggtcctgtggctactccttcagagtccactcacctctcgccactcctcagcttctctggtccagccccatcatctcctggctggaccccacttccccacctcactgtctacacctcgtctccctatctatctgccacccctgtcccatccaatctctacctcgaggcgagaacaatctttgcaaaatgaaactgtctacagtatgtttcccccagggccaccagagggcgcgtgtgagcatctaagtcagccgcttccctcctctgctcagaaccctccgtggctcccacctcactcgaccaaaagccaaagtctgtatcatacaaaggctctgcactgggccggatgtggcggcgcacacctgtaatcccagcacttcaggaggctgaagagggctgattgcttgggctcagaagttccagaccagcctggggaacatagtgaaaccttgtctctgccaaaaatacaaaaagttagccaggcatagtggcacacgcctgtgatcccagctcctcgggaggcttaggtgggaggatctcttgagcccgggtggtggaggttgcagtgagctgagattatgccactgcactctagcttgggcaacagagcaagaccccatctcaaaaacaaaaaacaaacaagccctgtacaatgtgaaacaccaggcactgttctgccttagggcctcttcacgggctgtttctctcttccccagatcccctcacagctcctcctgcatcttccttttggtctttcctcaaacatcactagttcagcaaggtcctgctggcccccacactcctacaccatgtcctgacttgatttctccatacctatcaccagcacgccatgcattttatttgcttatgaactctctgctactagatgctggctctgcagggtggggtttgcatactacactcagcacagcgcctggcacaagcaggaagctgaaatataattgttcaacgaagaaccttttaaaggtcaccctggagctgggcacagtggctcatgcctgtaatcctagcactttgggagaccaatgcagaattgcttgtgtccaggagtttgagaccagcctgggcaacacagtgagatcctgtctctacaaaaatttaaaaattagccaggcatggtggcacacacctgtggtcctggctactcgggaggctgaggcagcagggtcattcaagcccaaaaagtcaaggctgcagtgagctatgatcatgccactgcactccagcctgggtgacaaaacaagactccgtctctaaataaaataaaataaaggtcaccccggccaccaagcagcactggactgcagaggggtaggggtcgttcaaaaaattccctgcccccgcccccaacaccttctccctcatctccccatctatctgccaccccgtcccatccagtctctaccctgaggtcagaacgatctttgcaaaatggaaatccaattacacccctccctgcctacaaccctccatggctccctattgcctgtgatgctctaacatggcatctcaggccctgctgtcctgccaccttcccatcacttctactcagcgtctgtctctctctcacacacagttccttattctgctctccctccaaagggctctgcccagaggacagcattcgtatctctcatatccactctcacagcacacagggtctctgtgttttgctcccctaactggacttgggctcagctgttaaatgtctgtcttccccaccatcgagggactctgacgggaaagtaccattgtgggttgggctggctcttgttgcatacccaaccctgggcaaggagtggatgcttattcatttgtttaatgaatgaagatgaaatagacccaaaaagcagatcatctattcagtggatgtttaccgagttcccaactggtcacaagtgcaatggaggaaggtgtgcttgacagggggtatacatgtaggtgcaactgtagacagggtggccaggaaatgcctcccctaaaaagtgacatttcggcagaggtcttgaggaggtgagccatctaggtacctgtgcaaagagcattctgggcagaggaaacagcacgtgcaaaggtcctggggtaggaatgtgctgagatgtggctggggccctgcaagcaaggggaagagtggaaggaggtgagggcggctggggaggggggtcacagaggccatacagggccttgtggacctcagggaggactttggctttctagagaggtgggagccatcgggaatcctgaacagagggatgggatctggctcgggtgttcacaggtgtcctctggccgcagaggtggagatcagactgtgtgtggggagggttgctgggagtggagggtactctctaccccacctgtcccttgccttttgtccacagggctgtcaaagccagaaacctgaagcttccaccaagcactggctgcttctggcccccaccttgctggttgcctcctggcctcccttctggcctcctggcctcccttcctgccaactatggctctctcccacgtagcagctagagggagctcatgctaaacattctcaccctgccatctggatcctgacgcaaaccccctacctctacccccacccctgccacaggccctggcagccccacagtcacaagtccagccagcagcctccagcttctctccacatgcagttgtgaaacatttctccttcctcccctttgagccaccatcttctgtctgacctcagggcagcccctctctctcacagatgctccttcccctccaccatacccctcctccccctccaggttgcagctgggaagccccctcctccgggaagccttccctgacttgcaactctgttgcgctcaccatcatggcacgtccacaccacagtggcctgtggtctgtttccactccaaagtgttcactgtccagccccaacctttgcactctgagctcagcagagcagagctgaaaagagttctagaagctagggcccgagcagagggcacagaggcgggatccccctgcctcatcagatgctggcaggtaaggggcagggtaagaccaggagacaggggcatggtgcctagcagggcaggagagaagaggcctccggcatagcgcccttaagttgcaggttcaaatccaggctgtgcgccgtcatgtcagcacgacaggacacccacgtcactcctctcaattctgtctctccacgggggagctggggaacgagagcctcccagggtggctgtgggggttagaaataattttcggcaattccacacatcttttttggagcatcttctatgtgccagacactgaggggctgggtacaaaaaagtcgattctatagcgtaccagtgttgtgaaagaagataaagccaggaaaagtggctatgagtgtgtgtgggtttgggagtgtgtgtgtttttttttttaatcgtatttttagagacagggtcttactctgttgcccaggttggagtgcagtggtgggatcatagctcaccacagcctctgagctcaagggatcctcctgcctcagcctcccaagtagctgggaccacagggcgtgtgccaccgtgcccagctaatttttaatttttttgtagaaatgggggcctcgttatgtttcccaggctggtctcaaactcaagcgatcctcccgcctcatcctcccaaagtgctgggattacaggcacgagctactgtgcccggctgttgcaattttattttattttatttatttatttgagacagagtcttgctctgtcatccaggctggagtgcaatggcgtgatcttggctcactgcaacctctgcctcccaggttcaagcgattctcctgactcagactcctgattagctgggactacaggcactcaccaccacacccagctaatttttgtatttttagtagagacagggtttcaccatgttggtcaggctggtctcgatctcctgatctcaggtgatccacccacctcggccttccaaagtgctgggattacaggcatgagccactgtgcccggctgttgcaattttcaacaggatgatcaggaaaggccatctcccctggagaagatgacatttcagcaaacccctgtgaatttgagagaggagcacgcaggtgttcagttcaggagagttagaagagcatcctgggcagggtcacagcccgtgcaaaggccctggggctggaccgtgcctatatgtttgaataacggtggcagctgcatcgaggaagcgggttgtgagctggtgaggagagtgggaggaggtgagagcagggaggtgccgggaacagactgtgcaggactcgccttgtactttaaacacacaactgctccccaaatggggccgcccctctgcccagccttcactcccagaagccactagggggcgttctggggcagggtcggccaaccatggtcaggcccccgcctgcctttgtacagctggtgagctaagaatggtgtttacatttttaaaggactgaagagaagaagagaaaagagaacaggccacagaacccgtctgcggcccgcaaagcttgcaggatttaccatcgggctttctacagaaaagtcagccaacctctactctattttatttacgtatatatttttttgagacagggtcttgctctgttgcccaggctggaatgcagtggcgcgatcacagctcactgcagccttgacctcccagctcaagtgatcctcctgcctcagcctcccgggtagctgggacgacaggcgtgcggcaccatgcccaactaatttttaaattttgtattctgtaaagaagggggtctcgctttgtcgcccaggctggtcttgaactcctggactcaagtgatcctcctgcctcagcctcccaaagtgctgggattacaggcgtgggccactttttcccactggcaacctctactctacagccatcactgccaacccaggacaattctgcccctgatcccagtatgtttagcaatgtctggagactttctgaggtgttacgactgtggggctggaggtgtcactgacatccatcgggaagaggctagggtggcctctgagcatcctatagtacagaggacagcctcccacagagaatgatgcagtgccgaagtcaggagtaatggaaatcgtctaggaaatcctgtctgggaaagccagccccggacccctcacctcctcaagggataagaaggagaatccatctggcttcctgacctgatcatttgtgacctgcagggtatttttagcctctgagggaggggcactggctattctgagtttttttgttttttttttttggcggggtgggggggggcaaggttatttttggcctgggcatctatttattgaatttttatctccccccaaattttggaacaggagacagtgaaggcaggggcatttttttttttttttaagagtcaggatcctgcttcgtcgcccaggctggagtgcacttgtgcaatcatagctcactgcagcctcaaacctctgggctcaagccatcctcccacctcagcctcctgagcagctgagactacaggtacatattcacgatgcccaactattaaaaaaaaaattttagaaacgagtcttgctatgttgcccaggctgatctcaaattcttgtcctcaagcaatcctcccacctcggcttcccaacattctgggtttacaggtgtgagtcaccacacctgggtcaggtaagacttcttgaacgcacactgtgggccagtgatgactgttgacacctgggattcccaaagcaaagcaaatcacaacatcctcgcgcgcttggatcctcctcacagacacagacagtaaacaaacaagcgcagaacatcaggaaattacagactatgtgaaaagccgtccgctgtactgaacatcaggaggggtgtgggaagctgagactttgcagaaggtgcctgggagtaaacgttactggggaggtgatatttcaagagggtgggggagaaaaagcctcgaaaatatctggggaagggtcctccgtggcagaacagccagtgcaaacgccccggggtaggatcacacttagcacactggacgagcaacgaggagggaggagatggcccagaaagaccatgaagggccagaccccaggacagtccaagcctgtgggctactgcagtcagagtttggggctaccctcgaaaagaagacacacatgccttctccccaactcacatgacaggagagttttgcttttttgttttgggttttttttttttattgagaatgagtctcgctctgtcgcccacgctggagtgcagtggcacaatctcggctcgctgcaacctccgcctcctggattcaagcaatcctcccgcctcagcctccctggtagctgggactacaggtgcacaccaccacgcctggctaatttctgtacttgtagtagagatggggtttcaccatgttggccaggctggtctcgagcccctgacctcaggtgatccacccgcctcagcctcccaaagtgctgggattacaggtatgagccaccacgcccagctgataggagagctttgatggaaaccccatatgtgttgctagagtgtgagctccatgaggacaggacatggccaccaccccccatggcgccccctgcatggtgctgggtggggaggcaagtgtgtgcagattgcatgacaaggtgcacccagccttgctccaagaagtcctgagcacacaactgcaggtgcacaaaagatgcagacagccccatgtgtgcacacagacagctactccttcttgcagccctgcctcccccagcatgaccaccccctctgcaaaacacaaacaccagcacaggagggacctttatgaacaccggatgagtctgatggtcacgtggccacatgcacccttggctagatcaccatccaggccacacaggcagaggacacctatgcacaggtgcagacagacagacagacatctggattctggggacaccgggaccccctccatgtttctacttggcctcccacctcactccaggacccgtctctccccttccatcagggtgcccaatagcaaccactttgccccaaacccagcctgggaggagctgtctgtcttgccacggcaccttcagggtcactggggtcagggtttcagacccagggaacccccgcctcaggagcccctccccctgcctccccacagaggggctggaggaggggaagtgtctggcatctggaaatcagatccgtgagaggaacccacacagaaacgagagccttgtgtgtccttggccacatgtctcgccagggagaaaggagggggtggagggcaaagacgatgctctggcggggatggcagtgctcccactcctcccgttcctcttgaggggcacccactgccaccctccccaccgagatgcctgcgctggggctgaagcaacacatgctctgccaccagcctggcagggtagggaggacgcagacgccccgagatgcaagcgtcacacagcctcacatgcaggtggagaggccacccgccaggagcccaaactgctggatgcaaacacactcccgtgcagctgaggcgcctgtaggctcctccccaacgtgcccacagggtcctccaaggccccccaggagaaagggctcccctgggcaggctgggaatagaagctgggcttcgagtcccccccttccaccccctccctgcaggctccacagcccaggtgtgctggtccccagctccccatcctccccaagcctgggcgccagctacacccccaagagcaggaatcagcgtgggtgatcacggggtacgcaagcgcccagaagtggggattgagatgggcgccccttggagagaaagagggcctgcaggggtgtcccagagcagatgccacacacacatggggtggaccgagcggggccatgagggaggtcaccaagctgggtaggaagatggtggcaagaccagcaggagggccgggacccacatgtgagcgcacacgtatgtcgcacacgtatgtggctccgtgcacgggtgcgatcgctgccagccatggaattagttcccttttccgaattccagatgatttttcatctctgtaattaatgggcaagtcagttctgaacggcatggcagacaaattgctagttaggaaaatcacggataattttctcgatatgataatgaaggttgtaatccttctcttattctccctgttttcatcctacttttaagtaataaatttggcattagtgggaggggagcagggaggaaggagaagtcacctgccccccaaagctggggcctgacagggacccacgcagagtcccctgccgggggcagacaggagaagagaatgaggggtgtggaccctccgtggggttgatcaattcagggggccaggccctggagagcaggtggagggcacggagctttcaggctgtgagccagggtgaaggagtggggtctggggtcaggttagactcatgccagcccttggggtgttggagagagaagcagaaaccaatggtctgtccccaaacagcatggaggtcaacggcccggaatagacattcaccctcaggtgtgccccactggatccgacctcctctaagcagtgactccctaccaggataagggagccgggcaagcagagaggggaagagagaaagacagagagagatagagaaagacagagagagtgagagagagagagagagagagagagagacagacagagagagagagagcgcgcgagccagccatcttggcagccattttgaacccctccccctcctgcccccaggcacacatgttgggaagtgggatgtgggaagacagaccccagctctgagtccggtggaagccaggcggaagggggggccctgcctggaactgggatacagaaacacccacgcagctggcatggctgggggtggatgggggttggaacaggaagaaagggtccaggcaggtacagtgaggtgttggccagggatggggcagtgtgaggacccggactggaagtgtagagacaggggtgtgtgtagccagcggctgtcttcagatgggggccaggggtgcactggagagatacctgggagggcattttctggacacggctggagcaaacacagcatccccccaccccaccacttcaggcctggactcgggtcccaggaccgtcagatgggaggatgacaaccaaaccctcgcagctcaatccaatgcgcacctggggtgggggtggggagctgtcctcaaagcacgaataatccgagtggatcaaacctgccggcctcccgtgctttaacccggcaccacggagagaaggtgctgcccggctgcaccccctcctcctgacagcggcgccccccggactgcggccggctggacacccagacggacccctccccatcccccgcgccactgcctcccagagaaaaacaaccccctcgcccagcatcctgtggtgccagcccccgacacggctcctctggggcgcggggccggcgcgcggcgcgcacacgcaccccctccgctcacacccagacacctacacaaacagggcgccaagcacccgcgcgcacacgcaccggggacacgcaggcaccgccgcgccgcttccccacaaaggctggcgcgcgcgcgggcacacgcagccacgcgcgggcacactcgcggtcccctccccccgccaggcaccctgcggtagcccgtccgcacccccgcgccccgggcgctccgtgggggccgcccctcccaggcccctcgccagtgggggtgaggtgcgggctgcccccgacgcccctcccgctcaggtgcggtgccccgcgcggctcccgtgtcccctcccccctcgcggccaggacaggccccggcctcccatccttcccgcctcccctcttccacgcgccccgcacacctggcccaggtgcggcttcgcccctcgccctgggcccgcagacactcacctgtccagcgcctctctggggtcggcccagcgtgtctctcctgcggctcggcgaacccgggccccccgcccggcacatctcccggagccggggctggggggaagcgggtaggaggtggcgggacgagggcggcctccgtgtcccttccttcccctggcccagcaccgccgccgaccaaaaattaggaaaaaaaaaaaaaaagaaaagaaaagaaaaaaaagaggcggattacacggatccaaaggcggccccctcgcggcggcggaggctcgggactgggggcgatcgggtctgcgcccctcccggggagggaggcggtggggcgggggcggcgtcagagcgccgggggctggggcgaggcggagcgccccgaggcggcgccggcagcggcccgcatctcccccgcagctccgcggccccgacggaggcggcacgtgtgcgcccaggcgacttcccagccccctccgacgccggcggtggacgaggggttaacggggcagccggggcgcccctgcaggcccccgccgcccggcggcgccgctccggggcccgcgcggccccatcagccggggcctcctcggcagacggcggggcgggggcaccgcagcgccgacagctcccgcgccgacggctcgggctccccgcagtggccgcggggagctcgggttgggggcgggcggcgcggagctggcggaggggggcggcgcggctggaggcgggtgccgcggcgtcgcgcccccggtgcggccggagggggggcgccgggccgggcccgtgggcaccgcaggacgcgcggaccgagccggcgccgggcaccagcaatgacaagccgcctgctcgccccgctccccggcgcacccgctccgggaggggggcggtgggcgcgcgcaaaacccggcccggagtcgccgcccgggactggccgccgcaacccgcttgagcgccccaggagccggcccgaaaacccgggctggactttccttcctttcgcctcctctcgcctcctccctggaaaagcagggagagggaaagcgacgtgctggagccccgcgttggagcggggagtgggggaagggagacaggcgtaaggaagacccggagcggattttccagtgaagtataaggaaaggcgccgagcccggggaaggagggcgcaaatggggagatctggaagggttgtgcaaaacccgagttggattagataaagatgggaggaacggtgttggagcggggggttggggggtagatgcgacatggccaaatgcacccggggcacgcaaatttcgggccggattctttctcgggagacggagtaatgcgtcaggcctaacgcagtggaaacaagcaagacccggcccggaactcccgggacctgggttcgcatggtggggggttctggaagggggatgcttagtggctgaggcgacttgggctgccctcatcttcctggcagcgacgtgcaagggggacgggcaaaaggaggactggactcgggtacgaagggatttggcgcgctggctgcaccggagcggacaggtaaaagcggtttctggatccaggggcgctgcgaagggaatgcgatgaggccgctaccctgggagaccagacctacaataaaaggcgagggaggcacgcaaagccaggactggagcgcgggacgggatgagaccctcagcagaagatcctgggccaccgggacaggggcttggagctgaccgggcagcaggggcggagggaagcgttagggggaggtttgtacctgtaaacgcctcaaagtcttgcttttggggagggggtgcgaggggaaaaattgaattttatgttctctaaaagagtaaaaacccggcatggattttcaacacctaacaactccattgcagctggtggactctaagaagtagggcaagaagcaggcttgggttcccaggcatcagaccaagtgaggcgaggggcaggtttcgggttgaggctgcagagggagcccccgcaccccctctctggggtggggaaggctgttggacccggcttggctctctggagagcgaaagttatgactgccaagacctatagctggggctataaaactgggccccaagccaaaaataggcacttcggcagaacaggcaactttgtgcagggtgggggctggagggaaatggaagtgggaagaatcctggagtggagggaacaggggggagggggggagtccctgaagcggggctgctggctccattttatgaaagatgggaagactgatggctggggagggcttggaatcctcagggaagggaatccattcaagtgaggcccaaatgttaaagcagacagctcagagttcaaagttgggctgcatcttagcagcagggcagacaaaccctgatctgagttttagaggagggggacgggctgaggatggggatgggggaaacccccattccctatatgtccagggaagagagtgcattgctaaccatgcgctttgcagaatgaatgaggaaagggaaaagggttcctgagtaggagtggtaaatccacaaaacttgaggcatatctggatgggaaaaatgagtatctaagaaagcctgaattgaatatctgcacgggaattaacttggcctctaagaatcccttcctagaagcacgtccctgtggctaaactggaggaagtgcagggacaccagacttccaggctgcccgggtgaccacgcaccactgctgtggcagcctgtcaccctccaccgccttctacggacagctgtctcttcacgacggggaagggattcttgaaagccagaacctaggcaaatctggccccagagaacttcaaaatggagggatgggtcactttcgttcctccttcatgcccaggatttcatggctgcaaagctgtccagccttgaatctgggtggccaggttggacaccgggatctgggggaccaaatataaagtaggatttggtgagtgcaaaacggatcccatccatctgtggttgactgcagatccactgggtatggaggagggcatcccatctctctacgcctcaatttcccagtttgagatattgacagcaccaagtaagacccatgaaggctttgagatggagggcactccaggcagccagctttctataaacccagcagtaccgaaaagggaacagaacttgacgctcaggaaaagctggtcacctccttgttctcctgctccaggcctttgtccccaccccaccctccagccctgagcagcccacccacttccccctacagagctagcctaggaggtggttctaacttgcactctccagaggctacgagaaggagtggcctttacttacatgagggaaagcaacgacattctttaaggcaccctcagctcagtttggaaaaccccagccggaacccccctcacccccgcccctcgcccctttctagaccctctaaaccccactggtcccagctgggatcggctctccagcctccatctgatccatgtctcctggacttgtgagcggcgtgctcaggaggcaaagagtgcggaggggctggggggcgcgtaaagagccctggcgcccctcaggccttcggctgcgcagccgcagtggaggccgcgccagcaaccgggctccgggaaccaaggcgtccgcgcgcgcacgcagactcgcccgcgcgccgcgtgccccgcgctgcccaggtcggtacccgcgcttcggacaccctgctcccagggcgctcctcgcttccagcctcccactttgcgccttgggctccccatgagccccgctcctgagacaccccacgctctgtgtattccgtcccacgggacctccacgcccacggtgccacgcgcctcgagtaccccatgttctatgaaccctgcacctggacgccccatcttctgcgcaccctgtgctagagaacccgcacgcccagggtgccctatgcctagggcaccctgtgctctcctgcgtatctgggactccacattttgtacgcctagcacctccagcatcccagcgtcagacacagctgggctcgcctgtgccttgtctgtcccctctctgtgccttccatgtattgcgcccactgcctcggttgggcccccagcctcacagtcctgaaggctctgcttcaccccagtgctcagcttccctttgcctcaggcccagcgccctcgttcccgggtgccctgcctcaggctcctggacaggtcagggcaacgccagacagccactgtccaccaggcgcccccagcccctgttttcctagagcccattcggtataggatgcacaaccctgctgttcatttcactgctcggtgcacgtattcattccttccatttacgcctcaaacacacagcacgcaccttatatgctcttacctgtcaggtgcagtgtgatgcattgagaatgcgcctccagtgcacagggaacaaggcagggagccttctctgggcgctcccttcatcatggagaagatggactcagaatgtgtgatggaatgagccctggaaagtcagcaggtgccagggagtggaggatggacctatccaagccttgaggtgtgggtgaagttttgtgtgtccctggcctttccagaggctccctgtacccccatcttaggcaacttcttttatttatttatttatatttgtatttatttatttatatttgtatttatttatttattttgaggagtctcgctctgttgcccaggatggagtgcagtggcacgatctctgctcactgcaacctccctctcccgggttcaagtgatttccggctaatttttgtatttttagtagggacagggtttcaccatgttggctaggctggtctcgaactcctgacctcaagtgatccgcccacctcggcctcccaaaatgttaggattacaggcgtgagccaccgcgctgccctctttatttatttttagagacagggtctctctctgtcacccaggttggagtgcagtgatgaaatcatacctcactgcagctcactgcacgagccaccacacccagctaatttttgtttttttttttttcatagcttgctatgttgcccagactggtctcaaactcccgggctcaaatgatcctccttcctaagtctcccagagggctgggattacaggtgtgagccatggtggccggccaaccttgggcgatttctgagctccattcagttccacccccactgccaagccaagtggagggcaagataaagaggtcccagaattgggctaggaggataggttgggggcagggagtaattccaactgtgttctttttttttttttttttgagatggagtcccactctgtcatccaggctggagtgcagtagcatgatctcgactcactgcaacttctgcctcccagattcaattgattctcctacctcagcctcccaagtagctgggattacaggcatgcgcctccatgccaggctaatttttgatttttttttttttttttcagtagaaacggtttcaccatgttggccaggctggtcttgaactcctgacctcaaatgatctgcccacctcagcctcccaaagtgctgggattacagaaatgagccactgcacccggccaggtttttttgttgtttgttttttgttttgttttgttttgtttttttgagacgcagttgcccaggctggagtgcaatggtgtgatctcagcttaccacaacctccacctccggggttcaagccattatcctgcctcagcctccggagtagctgggattacaggcacacaccaccacgcctggctaattttgtatttttagtagagacggggtttctccgtgttggtcaggctggtcttgaactcccatcctcaggtgatctgcccacctcagtctcccaaagtgctgggattacaggcgtgagccaccgcgcccatcctcagggggtatattttgaaggtggagcagatggattggaagtgggatacgagggaaagaggtaagtcaaaatgtgtgagctgagtgagcccctggaaggatggagaggatggagaggaggcagttttgtaggttagatccaagcctttggtttgatatgtccaagtggaggcatgaagttggtgcccggggagaggttcaggctggccgagaaatggctcaaatgaacacgaatgctctcatttatactttatggtaactctgtgggtgggggactttctccccatcttatagaaggggcaacgaaggctccagaacatgcccaagtagttaaaaaatgtagttataggccgggcgcagtggctcacgtctgtaatcccattactttgggaggctgaggtgggcagatcacctgaggttgggagttcgagaccagcctgacaaacatggagaaacccggtctgtactaaaaatacaaaattagccaggcatggtggcacatgcctgtaatcccagctacttgggaggctgaggcaggagaatcgcttgaatccgggagctggaggttgtggtgagccgagatcgcaccactgcaatccagcctggagacagagcaagactcagtctaaaaaaaaaaaaaaaaaagaaaaagttaggttctgagccgggtcccagatttgggctgggaggatagggtgggggcagggaataattccaaccgtggtctttttcttttctcactctgttgtccaggctggagtgtagtgactcaatctcagctcactgcaacctctgtttcctatgttcaagcaagtctcctgcctcagcctcctgagtagctgggacgacaggcatacaccaccatgcctggctaattttgtatttttgtagagacagggtttcacaatgttgcccaggctgttctcaaactcccaggctcaagcgatcctcccgcctcggtctcccaaaatgctagcattacaggtgtgagccactgcgcctagctaggcaggactatttgaaaggcaccagggctaggctagcatggtgggaggccaggagagggtctagattatattcccagtgatactaggaaccccaagagggctttcagaagtgggtggcatgatcttatttggatgtttaaaagattatagggctgggcttggtggtgtgatcctgtatcctagctgaggcaggaggattcacgcacacaggcttgagcctaggacttctgggaggtggtgtgtgccatgaccatcggcgtcaatgtggtgaccccccaagagcaggggaccaccaggttgcctaaggaagagtcaactggcccaggttggaaacagagcaggtcaaaactcctgtgttgatcagtagtggaatcacgtctgtgaatagccactgcactccagcctgggcaacagggtgagaaaagaaaaagaccacagttggaattattccccgcccccaacctatcctctctaaaacctcccaaccctgtctctaaaacaaaacgttaaagtaaaaataaataaaataggccaggcacggtggctcatgcctgtaatcccagcactttgggaggccgaggctggtggatcatgaggtcaggagatcgaaaccatcctggctaacacagtgaaaccccatctctactaaaaatacaaaaaattacctgggcgtggtggcgggcacctgtagtcccagctactcgggaggctgaggcaggagaatagtgtgaacgggggaggcggagctttcagtgagccaagatcatgtcactgcactccaacctgggcaacagagcgagactctgtctcaaaaaaacaaatcaatcaataaaaataaataaataaataaaagattatatgagtgctccctcaataacacagaattactatatgaggcaggaaatggggagtgactgctaacaggtgtgagttttctttaggggatgatgaaaaacgtcttggaactagacatgatgaatgtactatgacatgacacgacatcgtccaccttaaaatggttggtggttaattttttgttgtgggaatttcagctcaattaaaaatgctggccgacgggcgcggtggctcacgcctgtaatcccagtactttgggaggccgaggtaggtggatcacgaggtcaggagttcaagaccagcttggccaagatggtgaaacaccgtctccactaaaactataaaaattagccgggcgtagtggcgggcgcctgcaatcccagctactcaggaggctgaggcaggagaatcgcttgaacccaggaggcagaggttgcagtgagccgagattgtgccactgcactccaacctgggcaacagagtgagactctgcctcaaaaaaaaaaaaaatgctaggggctggggcacggtgtcttacccctgtaatcccagcactttgggaggtagaggctggcaaatcacttgaggccaggagtttgagaccagcctggccaacatggagaaccccatctctactaaaaatacaaaaaaagttgggcgtggtggcacatgcccgtagtcccagctactccagaggctgaggcaggagaatcacttgaacccaggggcagagtttgcagtgagctgagatcgcaccactgcagtccagcctgggcaatagagtgagatgccaaaaaaaaaaaaaaaggaaggaaggaagataagaagggaggaaggaaggaaggaaagaaaatgctaggaatgctggtgtgctcttgtaatcccagctacctgggaggctgaagtgggaggatcacttgagcctgggagttagagactgcagtgagctgtgactgcaacactgcactccagcctgggtgaccgagcgatacccctatctcttaaaatatatatatatatataatttattgattattattatatattgtatatattatataatattatatattataatattatatataatattatcaaaaaatattgatataatattatcaataaatatcaataaaataataataatcaatatatataattgattatatatattatatatattatatatattatatataattgatatatataatatataatatattatatattatataatataatatattatatattatataatattatatattatacattatataatattatatattatacattatacattatatattatacattatataatattatatattatatattatacattatataatatatattatattatatattgtataatatatattatattatatattgtataatattatatattatattatacattatacattatatattatacattatataatattatatattatattatatattgcataatattatatatcatatattatatatataatatataatattatatattatatattatatatataatattatatattatatatataatatataatattatatattatatatataatattatatattatatatataatattatatattatatattatatattatatattataatatatattatatattatatattatatattataatatataatattatatattatataataatatataatattatattttataatatataatattatatattataatattatatattatatattataatattatatattataatataatatataatatataatatataatatataatatatattatataatacataatataatattatatataatatataatattatattatataatattatatataatatataatatataatatataatattatatattataatatataatatataatataatatattataatatataatatataatataatatattataatatataatatataatataatatattatacaatatataatatataatataatatattatacaatatataatatataatataatatattatacaatatatagtataatataatatataatataatatattatactatatatagtataatatattatataatataatatattatactatatatagtataatataatatataatataatatattatactatatatagtataatataatatataatataatatacaatatatagtataatataatatatattatataatgtataatatatactgtataatatataatatataatgtataatatataatgtataatatatattatataatgtataatatataatatattgtataatatataatatatattatattatatatatcaattatatataatatatataatatatataatatatacaatcaattatatatatattgattattattattttttaattatacaggtcagccgggcgcagtgactcatgcctgtaatcccagcactttgggaggtcaaggcgggaggatcgtttgagcccaggagttcgagaccagcctgggcagcatagcaagacctggtctctaaataaataaataaataaataaataaattatatagtcaatttgagagggagccaggagattcgcgaggtgatcaccactgtcatccaggtgacaggcaggtgatggaggcccagaacaggatgctggggggaaacgttaggttttgggcatgtcttaggggcagagtcaacaggaccccttactttgcaccctccttgaactctgctcatgttacttcctgaccactctattgaaaatgcaaaacacaggacggggcgcgctggctcacgcctgtaatcccagcactttgggaggccgaggcgggtagatcacgaggtcaggagctcgagaccatcctggctaacacggtgaaaccccgtctctactaaaaatacaaaaaattagccaggcgtggtggtgtgtgcctgtagtcccagctactagggaggctgaggcaggagaatggcgtgaacccgggaggcggagcttgcagtgagcagagatcacgccactgcactccagcctgagcgacagagcgagactccgtctcaaaaaaaaaaaaaaaaaaaagaaaagaaaagaaaatacaaaacacaaaaattagctgggtgtggtggcgcatgcctgtaatcccggctacttaggaggctgaggcacaagagtcgcttgaacccgggaggtggaggttgcagtgagccgagatcacacctctgcactccagcctgggcgacagagcaagactctgtctcaaaaaaaagaaaactgcaaacacccccaccctcctcactcccttgatctcctctcccctttatctctctccagtcccagagatgtggggggggggggggtctcgctatgttgtccaggctggtctcgaactcctggtccccacagcatatcctgacctagtttcgttttcattcatttatctgtctccctcactagaataccaactccccagtccagagatgtttgtttcttgttcactgctgtctacccggagcctaggaccgatcctggaacatagtaggcgctcaggagaaagcgggggagtggaggaaagcgagaatcccggaagccgccgggttccagcctgagcagcaggcgggcgtttaagtggaggcggattcctagttaggcaccagctgaaaggggagcccggctgggctgcgcttccttccccggccgctaggggccgcttccccgctgctctgcggccgccaggtgagggggccccgccccttctccccaggtgctcagggagttggggtgtgaggggacaaagtgggggtgaagggagagagctgagcgtgtttgagatgggggctgcttaaaggaagggaaaaatgcgtagggaggttgggaggtgtgagaaggtgaggagacagcccggtgttagggagagaggagcggagagttgagggaggtgcgggaagatgggtgatcaactggggagtccgggaaagtctggcaggcggaaggccttgccctggtggctccactggaggaaatttagaccatgcatggaaaagaccgggacgattgaggggtgggattggcctgtggggttgaggatcccagggaagaagccctaagctttgctggacttggacttggccagtgtgttctggggaggaagagggatttctcagacccagatccctcagaccagcaacggggagggacttctcctttgaggagtgagatgtgcctggcaagctcaccagctagcttttgcagaacgtgtggccagtaagtggcttattcaacctggcactgactctgcctctctctccttcaagcctcagggccaggattcattgtgtaatgaattgagtggtgggaaaacagcaatgaatgagacagatccagtcccggcactggccagtcctggcacaaagaaggctgcccagccctggggaagtgacaggtaaactgaggcagggacctgctggctttaaatagcagtccccctcatggtgatctgggcagagaggaccactcatatggaggctctgaggctgttaccaagaaaaaagccggcaggatccaagctgcaatagtgtgatagggagtgttggggtctgcggcaacccagaaatgcctgccaggtctaaagggatcctgtgtttgggattaaggtggatgtgggggcttgcaggctctgtggaatggagataggttgggaagggggttgggaataggagtgaggggttataggtgggtcccagagaggtagaggtgatggccacgggaaggtagaaggtgactcctaaccttgcatgagctcatttcaggggacacaaagccaaatgctgaccagggaatgaaaatgcagaaattgggcaggtgtgaggcggtggtgaaggacagggtagctgaagttgcaccacccccccttttccttaggcacccgcttgctaccactcagctccagctgtgcgctaccacgtgggaactcaggctcaatgttgccaaaatagcttcttcaagagaagccagaaatcacggttgttgcgcaaaattccctgagctttaaatatcccatggggatctactaaagttaaattgctgccacccagcaattccattcctgggttgattcccagtgggaacaggagcttagggtcacctaaagacatatccatggatgtgcctagcagcttcattcatgatcaccaaacaccagacaccccttaagttgaccatcgactggcaagtggaaaagaaatgggaggacattcttataatggaatataacgcagcaatgaaaaagaatatactactgacgcattcacagcatggatgaatcccagagacataatgttcagtaggagaagcaagataacaaagagaataccccgagtgatttcattctgtgttgttcaaggccaggcagaagtaacctatgaaaagagttggggaagcccagggtttccttacttcggcctcattgacatttgtggctaaatgatcctgcgtgatgggggctgtcctgtgcactgtaggacgttgagcagaatccctggcctccaaccattacgtaccagcagcaccccccagttgcgacaaatttctgttgttaggggcataatcaccatcagatgggagccactggtccgggtgtagtggctcacacctgtaatcccagcactttgggaggccgaggcgggtggatcacttgaggccaggagttcaagcccagcctggccaacatggtgaaaccctgtctctactaaaaatacaaaaaaattagccagacatggtggcgtgtgcttatagtcccagctacgtgggaggctgaggcaggagaattgcttgaacccaggaggcagaggttgcagtgagcaaagaaagatagcaccactgcactccagcctgggtaacagagcaagactacgtctcaaaaaaaaaaaaaaaaaaaaaaaaagccactggcttggtgatgttttgaggcagcccacttcctggaaagtagcccagggagcctcctgggagactggactgttcttgatcttgaactaggtgacagtgataagggtgaaatgtatttcaaaaatccacggacctgtgctcctaagatttatgtgtttcacaataaagacattaactctacaacatggatgacccttgaaaacatttggaaaagggaaagaagccggacacagagggtcacatagtgtatgacttcctttatatgaaatgcccaaaacaggtaaacacatagggacagaaacagattggtggttgccaggggatgggggatggggaatggagattgactgctagtggggatagggcttcttttgggggtgatggaaatgttctgtaattagaggtgatagttgcacaactctttgagtatacaaaagtccagtgaattgtacattttaaaatgtacaattggggccaggcacagtgactcatgcctgtaatcccagcactttgggaggccgaggcgggcagatcacttgaggtcaggagttcaagaccattctggccaatatggtgaaaccctatctctactaaatatacaaaaattagccaggcatggtggtgcacgcctctagtcccagctactcaggaggctgaggcaagagaatcacttgaacccaggaggcagaggttgcaatgagcaaagatcgcaccactgcactccagcctgggtgtcacagcaagactctgtctcaaaaaacaaaaacaaaaaaatgtacaattaatcttggctgggcacagtggctcatgcctgtaatcctaacactttgagaagcagaggtgggaggattgcttgagcccaggagtttgagaccagcctgggcaacatagcaagaccccacctctacaaaatttttttttttttttgagacagagtcttgctctgttgcccaggctggagtgcagtggtgcgatcttggctcgttgcaacctctgcctcccaggttcaagcgattctcctgcctcagcctcccaagtagctgggattacaggcgcgtgccactacacctggctgatttttgtatttttagtagagacagggtttcaccatgttggccaggctggtctcgaactcctgacctcaggttatccacccacctcagtctcccaaagtgctgggattacaggcgtgagccacagtgcccggcgaaaattttttttaattagctgggcaacatggagcctgcctgtaatcccagctacttggaaggctgaggtgggaggatcgcttgaccccaggagtttgaggttgcagtgagctatgattgcaccactgcactccagcccggggaaacagagagagattctgtttctaaaaataatataaaataaaatggcgagtgttacgttaggtgaattttattccaaaaaggaatttaaaatttttttttaattttttttaaaaaaggaattttttaaaaacaaggagttaaccacacaggccaaacaacacatctggggccagtttggccccagggctgccgtcatttgggaatggagggaaaggaaggggacggggtgggggggtgggagggtaatgcaccatccaggagttgtgggcgttcttggtgaagggtgggggatgacgcaacttggaggcaaaagaaagtatgtctcggctcaggggagcgctccctcttaacccaacctgtcagccctggaaagaaatcagctacgggtcggaggccagccagcgaactgtcaaggaagtgcagagttctgacgagttagagaaatgacaaccgctcagccccgcccggcctgacaccctggcggtggcatgatgaagtggtgcttgccgggtgggcggaggatgctctctgcgagcttgcgggaaagtgggggtgctcacccgagttcttctgcagtgtgaagagaggtgggttcggcctccctggtaacaaagggcggacggggtggcatttgcccctacccatccctcctggagggagagccattcccgtgggtgcaaggaagagagaagacagcgggcttctgggggcacggctgggggtgcagggtctgagtctccgttggcttcaaaaaactgaatgatggccgggcgcagtggctaacacctgtaatcctagcactttgggaggctgaagcaggcagatcaccggacctcaggagtttgagaccagcctagccaaaatagtgaaaccctgtctctactaaaaatacaaaaattagctgggtgtggctgcaggtgcctgtaatcccaactactcgggatgctgaggcaggagaattgcttgaaccctggaggcagaggttgcaatgacccaagattgcaccactgcactccagcctgggcaacagagcaggactccactcaaaaaataataaaataaaataaaaaactgaatgagtgaagagagacaaagaaaattaaggaggccaggcacggtggctcatgcctgtaatcccagcactttaggaggctgaggcgggcagatcactggaggtcaggagtttgagaccagcctggccaacatggtgaaactctgctctaccaaaaagtacaaaaattagccaggtgtgatggcgggccctgtaatcccagctactcgggaggctgaggcaggagaatggtgtgaacccgggaggcggagcttgcagtgagccgagatcgcgccactgcattctagcctggacgacagaacaagactccgtctcaaaaaaaaaaaaaaaaaaaaaaagaagaaagttaaggcctcccgagtagctgggaccacaggcgcacaccacaacacccagctaactttcatattttttgtagagatagggtttcgctatgttgcccaatgtggtcttgaactcccggctcaagtgatcctcctgcctcagcctcacaaagtgctgggattataggcgtgagccactgcacctggcctgcatataactttggacttcccaaaaacttaaccactgatagcctatggttgatcaaaagccttaccaatgacataaacaatccatgaactcgtattctgtatgttctatatattacatacagtattcttagaataaagtaagctagaaaaaagaaatggtatgaaaatcatgagaaagagaaaatgtatttaccgttcatgaagtggaagtggattaccataaccgtcttcatccacgagtcttccgatggaataggctgaggaggaagaggaagaagaggggttgtctcaggggtggcagaggcggaacaacatccacttacaaggggactcaggcagttatggctcaagcccgtgttgttcaaaggtcaactgtaatagaattttttctttttcttttttttttttgaggcagagtctcgctctgtcaccccggctggagtgtagtgacgagatctcggctcgctgcaacctcggtctcccgggttcaagcgattctcctgtctcaacctcccaagtagctgggattataggcgcccgccaccacacccggctaatttttgtatttttagtagagacggggttttgccacgttggccaggctggtctggaactcctgacctcaggtgatctgcccacctcggcctcccaaagtgcagggattacatgtgtgagccactgcacccagccagtagaaatgtattgcttacagttctggaggccaggaagtccaagatcaaggcactagcagatttggtgtctggtgagagcccactccaccccccaggttcaagcgattttcctgcctcagcctcctgagtagctgggattacaggtgtgcgccaccatgcctggctaacttttgtatttttagtagagatggggttttgccctgttggccaggctgttcttgaactcctgaccttaggtgatccacccacctcagcctcacaaagtgctgggattataggtgtgagccaccgcacctggccaagcgagttatttttattttatttatttgtttatttgagacaagatctggttctattacccaggctggagtgcagtggtgcgatctcggctcaccgcaacctccatttcccgggctcaagccatccccccacctcagcctcccagggagcagctgggactacaggtgcgcaccactacacccaactgattttttttttttttcagacggagtctcactctgtcaccaggctggagtgcagtggcgtgatctcggctcactgcaacctccgcctcccaggttcaagtgattctcctgcctcagcctcccgagtagctgggattacaggtgtctgccaccatgcctggctaattttctctatttttaatagagacggggttttaccatgttggccaagatggtcttgatctcctgacctcatgatccacccgcttcgacctcccaaagtgcagagattacaggtgtgagcgaccgcacccggccaatttttgtattttttgtagagatggggtttgtcatgttgtccaggctggtatcgaactagtgagctcaagtgatccgtctgcctcagcctcccaaattgctgggattacaggcgtgtgccactgtgcctggcctatttatttatttatttatttatccaatgtttgttttaagttcaagggggcacatgtccaagtttcttatttgggtaaattgtgttttgcaggagtttggtatacagataatcttgtcacccaggtaatcaccataacacccaacaggtagtttttcaatcctgaccctccttttaccttccaccctcaaatagacaccagtgtctgttgttcccatcttttttttttttttttttgagatggagtcttgctccgttgcccagggtagagtgcactggcataatttcggctgactgcaacctctgccttccgggttcaagagattctcttgcctcaccctccctagtagctgagattataggtgtgtgccagcacgcctggctagtttttgtatttttagtggaaatggggtttcaccatgttggccaggctggtctcgaactcctgacctcaagtgatccacctgcctcagcctcccaaagtgctgggattacaggcgtgagccgctgtgcctggcctgttgttctcacctttgtgtccatgtgtactcagtgtttaactaccacttataagtgaaaacgtgtggtatttggttttctgttcctgcattagttgacttaggagaatggcctccagctccatccatattgctgcaaaggatataatctcattctttttttttttttttttttttttgagacaatctcattctgtcacccaggctgaagtgcagtgtcgtgacctcggctcactgcaacctccgcctcccaggttcaagcaattctcctgcctcagcccctcaagtagctgggactacaggcacctgccaccataccctgctaatttttgtatttttttgtagagacggggttttgccatgttaaccaggctggtctcgaactcctggcctcaagtgatccacccaccttggcctccgaaaatgctgggattacagccatgagccaccatgcccggcctcattcttttttaatggctgcatagtattccatggtgcatatgtaccacattttctttatccaatcctccattgacgggcacctaggctgattccaagtctttgctattgtgaatagtgctgcaatgaacatacatgtgcatgtgtttttatagtagaacaatttatattcctttgagtatatacccagtaatgggattgctgggtcaaataaaatagaagaattttaaattgtttgagaaatctccaaactgtcacactcaattataagggcaataatctcacccatgagaatggggccctcctggcctaatcacttcccaagaaccccaactcttccaacatatggatttggaagggacacagacattcaaaccatagcagtgaccttatttggacaaagcgtttttgcagatgtaattaagttaaggattttgcaatgagatcatcctggattagggtggcccaaaatccaatgataaatgaccttagaagagaagggggttagacacagagaagaaggccaagtgaagacaggcagggctttcagcagtacagacacaagcaaggaaccatcagaggctggaagaaaaaaggacgaatcctcacctagtgccttcggagggattgcagccctgcaccaccctgattgcaacctctggcctccggaatggtgaaataataaattcttgttgtttccagccacctagtttatggtaatgtatttcagcagccccaggaaatgaacacaggccctgatatccaattccacaagcacttgatgaagcgtcaggaagggcccgtggtacagtggagggggagggaaactcgaaaatggggagtgttgagaaacggatggacagtgaggtggaggaccagagaggcttttttttcttttcttcttttttttttttttagacaggacctctcttcgtcacccaggctagaatgcagtggcgcagtcgacctcctgggttcaagcgatcctcctgcctcagcctcccgagtagctgggactacaggcacatgctatcatgcatggctaattatttatttattttttgtagagatggggtgtcactgtgttgcccaggctagtcttgagctcctggcttcaagccatcctcctgtcttggcctcccaaagtgctgagattacaggcttgagccaccatgcccagactggggaacctctttatagcagaggtgatgacccagaactgagctggagcatgccacaaacctacagggacagccagtaggtaatataaatacgccaagcagccaagataaaaagactgactgcaccagcaacggaacagcttcagtgtcagggagacagtaagggggggtgggactatggcaaataatgataagaatgagtaacatttatcagcacttgctaagcccgttccttatatagcatgaactcatttaattcagttgtgttttttttttttttttgagacaagtcttgctgtgtcacccaggttggagtgcagtggcacaatctcggttcactgcaacctccgtctcccaggttcaagcaattctcctgcctcagcttcccgagtagctgggattacaagcacgtgccaccacacctggctaatttttgcatttttagtagagacaaggttttgccatgttggccaggctggtctcgaactcctgacctcaggtgatctgcccatctaggcctcccaaagtgctgggattacaggcatgagccaccacgcccagacaagatttcatctttagaggaagtcaggcatccagatttttatgcaaaaatcacctgaggtctggcactggtggctcaggcctgtaatcccagcactttgggaggctgaggggggcgaatcacttgagttcaagagctcaaggccgcctgaccaacatggtgaaaccctgcctctactaaaaatagaaaaaaactagctgggcctggtggcctttgcctgtaatcccagctacttgggaggctgaggcaggagaatcgcttgaacctaggaggcagaggttgcagtgagcagagatcacaccactgcactacagcctgggcgacacagcgagacgccatctcaaaaacaaaaacaacaacaacaacaatgaaaaagcagcctgtatttaaaagctagcaagtcatgggccgggcgcggtggctcacgcctgtaatcccagcactttgggaggccgaggtgggcagatcacaaggtcagaagatcgagaccatcctggctaacacggtgaaaccccgtctctactaaaaatacaaaaaattagccgggcgtggtggggggcgcctgtagtcccagctactcgggaggctgaggcaggagaatggcgtgaacccgcaaggcagagcttgcagtgagccaagatcgcgccactgcactccagcctgggtgacagagtgggactccatctcaaaaataaataaataaataaataaataaataaataaataaataaataaataaaagctagcaagtcattacaaaatgtttttaaagcctgcatggaccaagccaattacatctgtgggctggattcagctctggggcggacacagagggaggggcggggcatttagtgaaggcgatgcaaagcatcatgggtgagttggggaccacatgggccagggggtttgactaggtggtgcctaggcgggtgccagcatgtttgtcggggctggcgcggtggagggggcgtggtttaaactgaacaggtgttttgggtctaggttggaaaggacctttggagccacgataacatttttcaattttgaagaagtcagtgatagcttttaaacagctgaatgactcagtcatgcctgtctgtccccatcccccaatcccaacacccagaaagctgtgaatcaggctttctttgggggtggagggacagtagatccatccatgaaggaaacaaactaaacagcccccgtcttccagcgcgctcacagccgccggggagagggggaaggtgtccttagtaaggttaggataggatggcagccgtgatggtgggaccgtggcagagggttagtggttgtctgcagatatgggagccactgctatgtgttcaatgcactaaggatgcaacgacgaacaggacagacatggccctgccttcaaggaaaaagactgtgaaggaggaaggaaataaggagagacggtaattccagggggtgatgagaaaatgtaaaaattaaaatagcaggatgggggatggggctcagatcggcagcctacaggcccaggagacagagcgggtgggcaggaggatggaggatggggagcgggggtcctcagtggctcacaagccaccgcttgctccctgggacccagcagcctggctgggcctctgtctccccagaatcaccctatcacaccaagaacaaacccacggctgacatagattcctgactccgagcccaagcaagggggagaaaggggaggaaaaaaacacccatctgttcttcctctgatggaatgtgatttttcacccagtgcttaaacctcgagcttctcctcccatttcctctcggcagccgcagcgaagcgatataaatcgctgtaaatgggttttcccggccggttgccgtgttgttttaataatggttcattttctgcctggggggaaaaatagttggtaaagaaattgaggagggggggttcattttgtgtgtgtgtgtgtgattgtgcgtgtgtgtgtgtgtgtgtgtgtgtcctgttgccttagagaagattcccgaatattccactgggacaccaagtgacccgtccagttggggaattggggaattgctggtcagagaaccagtgcatcccacttgcctggacaaaagggattcctttttttttttttttttttttttttttttgagactgagtcttgctctattgcccaggctggagtgcagtggtgcaatcccggctcactgcaatctccacctccctggttcaagcgattcttctgcctcaacctcctgagtagctgggattacaggcgcccgccagcatgcctggctaagttttgtattttaagtagagacagagtttcgccatattggccgggctgatcttgaactcctgacctcaagtgatctactcaccttggcctcccaaagtgctgggattacaggcgtgagccgccgtgcctggccgaaagggattcatttgcaaacctcctgggcacatatattaagcactaactgtgtgctatgcctgactaggtgcgtgggatatgtaaatgaataaatctcccaggccctgacctctctgggggctcacattctagaagcagagagagcaacattaagacatcactctgccaaactaggtaattacaattgtggaaactgctctgaggagactgttgagtgccacgggaatggaaaacggatcttggcagggctgggctgagcatggtggctcacagctacaatcccagcactttgggaggctgaggcaggaggatcgcttgaggccaggagtttgggaccagcctggacaacatagcaagaccaccaactctaaaaaaaaatttaaaaattagctgggcgtggtggcacatgccttctagtcccagctacttgggaggctgaggcaagaggatcacttggacctaagaatttgaggctgcagtgagctatgatcatgccattgtactccagcctgggccacagaaaaagatcccatctcaaaaagaaaagaaggctgggcatggtggttcatgcctgtaatcccagaactttgggtggccgaagtgggtggatcacttgaggccaggagttcgagaccaaactggccaacatggtgaaaccccgtctctactaaaaatacaaaaattagccaggggtggtggctcatgcctgtaatcccacctactcaggaggaggcaggagaattccttgaacctgggaggcgggggttggagtgagccgagattgtgccactgcatttcagcctgagggacagagtgagactctgtcagaagagaaaggaaggaaagggaaggggaggggaggggaggggagggaagaagagatcttggcataacccaaacccccttcagaagggtcaccctggctgctactttaaggataggcagacagagggagttgtgggagggaaggccagtcaggtggagagacttcctgggcaaacttctggaggttgaaagagtgtgatgtgggctctgacctgggagaacagtcatggagccaaggatagtgggggcgggggatgctggggtcctggggaatggcgtggggagtggccagagacttgaggacttttgtcttgttcctgagcagagtcttccattcctccggcattgagacttttttttttcttttttttttttttttttgagacagggtctcactctgttgcccaggctggagtgcagtggcgtgatctcggcttactgcagcctccgcctccagggttcaagtgattctcccgcctcaacctccctagtagataggattacaggcatgcaccaccatgccagttaatttttgtatttttagtagagacagggtttcactatgggtgaacttgctggtctcaaactcctggcctcaggtgatctgcctgccttggcctcccaaagtgctgggattacaggcatgagccaccacacccagccaggctctttttatagacaaagatgttagcgttctcgccctctcatctcacagggcatgaggtctctctccagcctcttgtgtgaaggcacaggtcccattcacgaggtctccaccctcctcatctcccataggccccaattcttaacaccacgacctggggggttaagatttcaacatatattggccaggcatggtggtgcacacctgtaatcccagcactttaggaggccaaagtgagcagattgctttgagctcaggagtttaagaccagcctgggcaacataccaaaaaccccatccctactaaaaatgcaaaaatcagccaggtatggtggtgggcgcctgtaatcccagctactccggaggctgaagctggagaatcactggaactcaggaggtggagtttgcagtgagccgagattgcgccactgcactccagcctgagcaacagggtgatgagactccatctcaaaaaaaaaaaaaaaaaaagataaaaaagatttcaacatataaatttggggggacacaaacattcacaccaaagcacttggcttgccaagtcatctccccaccccagccccatccgtttactccctacagttggttgaatgacagtcctccaaaaatgtacattcatatcctaacccccagagcctgtacgtgtgatcttatttggacaaagggtctttgaagttgtatttatgtgaagaatcctgacatgagatcatcctgaattagaatgggctctaaatctattaataagtgtcctggccgggtgcggtggctcacgcctgtaatcccagcactttgggaggctgaggcaggtggatcaccgaaggtcaggagtttaagaccagcctgaccaacgtggtgaaaccccgtctctactaaaaatacaaaaattagccaggtgtggtggcgggcgtccgtagtcccaactacctgaaagactgaggtgggaagatcagatcacttgagttggggaggcagaggctgcagtgagccaagatcatgccactgcattccagcatgggtcacagagccagagggaaaaaaaaaagaaagaaagaaaaaatgtcatcagaaaagaatggagaggccaccgtgactcacacctgtaatcccagagccttgggaggctgagttgggaggatcacttgagcccaggagtttgagatcagcctgagcaacatagtgagacccctgtctttagaaaaaagtttttaaaaattagtggggcttggtggtgtgtgcctgtagtcccagctactcaggaggctgaggtgggaggatcccttgagcctaggaggtcgaggctgcagtgagccatgattgtaccgcttcagtctaggctgggtgacagagcgagattccgtctcaaaaaaatttaaaaaaaaaggaaacgaaaaagaaaaaaagggaaccagacacagagacacagggaaaaagtccatgtgacaatggtggcagaaactggagtgatgcagccacaagccaaggaatgctgggagccaccagaggcttgaagaggcagaaaggatcctcccctagagcctccagagggccaccttgacttggggctaatgatactgatttgggacttaagggatccagaactgtaagaaaataaatgtgttttttttgtttttgttttgaaattatattttattgatatataatagtcgtattgttttgttttctgctgtcctgaagccacctagtttgtgggcattggttacaacagtcacaggaaatattatagttggccctccatagccacgggttccttatccaggattcaacaaactgtgaatggaaaacattagggaaaaaaaccctaatcctagcactttgggagggtgaggcaggcagatcacttgaggtcaggagtttgagaccagcctggccaacatggtgaaaccctgtctctactaaagatagaaaaaaattagctgggcgtggtggcagacacctgtagtcccagctacttaggaggctgaggcaggagagtcgcttgaacctgggaggtggaggttgcagtgagccaagatcatgccattgcactccagcctgggcaacagagtgagatcctgtctaaaaaaaacaaaaagaaaaacaaaaaacaacaacaaaaaccctggctagccatgctggctcatgtctatagtcccaagaatttgggaggctgaggtgggcgggttgttggagcccaggagttggagagcagcctgggcaaagtagcaagacccccatctctacaaaaaacattaacaaaataagtccagtgggtggcgcacacctgtggtcccagctactcgagaggccaaggcaggagaattgcttcagcctgggaggttgaggttgcactgagtgatgattgcaccactgcaatccagcctgggtgataaagcaagactctatccaaacaaacaaacaaacaaacaaacaaaacaaaccatattttatctatttatcatttttattattttaaattattattattatttatttatttagttttgagacagagtctcactctgtcgcccaggctggagtgcagtggtgcgatcttggctcactgcaagctccgcctcccaggttcacgccattctcctgcctcagcctcctgagtagctgggactacaggcacccgccaccacgcctggctaattttttgtattattattattattttctttttttttttagatggagtctcgctctgtcacccaggctggagtgcaatggcacaatctcagctcactgcaacctccacctcccggattcaagtgattctcctgcctcagcctcccgagtagctgggactacaggcatgtgccaccatgcccggctatttatttatttatttatttatttgtatttttagtagagacggggtttcaccatgttagccagaatggtcttgatctcctgacctcttgatctcctgacctcgtgatccgctgcctcggcctcccaatgtgttgggattacaggcgtgagccaccgtgcccggcctatgtttaattattttattattttaacaattatctttatggttaaaaatatcacaacagtaaaaaaaaatacattctctgcagcccggattcagaaaatgataaaaattaaaaaataaaaatgagggaggcggatcacttgtggccaggagttcaagactagcttggccaacatggtgaaaccccgtctctactaaaaatacaaaaaaattagccagtcatggtggcacgtgcctgtaatcttcgctactcgggaggctgaggcctgagaatcacttgaagccgggaggtggaggttgcagtgagccaagatcgcgccactgcactctagccacacatatgtatacatatacatatatgtgtatatatacatacatgtatacagcatatatacacatgtatgtatatatacagcaggatgtgcataggtgatatgcaaatactatgctgttttataaaagaaacttgagcatctgtggattttggtatccagggaggtcctggaaccaatcctacaggatgcaaagagaggactagaatacattccctttcctagcaaaacatcccaagagttatcactgggtccggctgctcttctctcgtcctctctctgatcctctcctttcagtattttgttcccactcggccactagaagggctccatcctgcccaacctgatggtcgtttctcagcctctaggactgtgcactcccagcttcccctcccacctccaaggccaccacttcttagtctcttctgtgattcctcttcatctcccaatcttagccttgaagagaaagccaagagccaagatcggatcattgctcaccagcctgggcgacagagcgagactctgtctcaagaaaaaaatgattaaaataaaataaaataggctgggcacagtggctcacgcatgtaatcccagaactttggaaggtccaggcgggcagatcacgaggtcaggagttcgagaccagcctggccaagatggtgaaaccccgtctctactaaaaatacaaaaaatttgccaggtgtggtggcgggcacctgtagtcccagctactcgggaggctgaggcaggagaatggcgtgaacccggaaggcaaagcttgcagtgaggcaagattgcaccactgccctcctgcctgggcaacagagcgagactctgtctaaaaagaaaaaaaaaagaaaacaattaataaataaaaataaaataaatgctgggctgagcgtggtggctcactgtaatcccagcagtttgggaggccgaggttaggagtttgagaccagcctggccaacatggtgaaaccccatctctactaaaaacacaaaaggtagtcgggcatagtggcaggcacctgtaatcccagctactcaggaggctgaggcaggagaatcacttgaaaccggaaggtggaggttgcagtgagctgagatctcgccactgcactccagcctgggcaacaagagtgaaactccatctcaaaaataaataaataaataaataaataaataaataaataaataaataaatgccacttacacccgacagctcccagtggcgtcccccacctctcacctctctgctgaccttcacctgccccccagatgtctctgctggaaacccagtgggcacacccaagtatcacaccggaagcagactcttcatcacactccagacctgtttcctcctctgtcctccccgctcctctgtcctccctgctcctctgtcctccccgctcctctgtcctcccctcctctgtcctccccgcccctctgtcctcccccctcctctgtcctcccccctcctctgtcctccgcctcctctgtcctcccccctcctctgtcctcccccctcctgtgtcctccccaaatcagttaatgacacatcatcgtcctctattggtgcaggagctggaatagtgtcttcctcccctgacaaaattcatgtttacctggagcctcagaatgtgaccatatttggaaatagcatctttgcagatgtcattagttaagttaaaataagatcttactagcccagcactgtggcttgagcctgtattcccagctatgcaagacgctgaggtgggaggatcacttgaggccaggggtttgacaccagcctgggcaacataatgaaaccttgtctctacaaaaataaaaattttttttttttttgagactgagtctcgctctgtcacccaggctggagtccagtggcacgatctcggctcactgcaagctccatcttccaggttcacgccattctcctgcctcagcctcctaagtagctgggactacaggcgcccgccaccacgcctggctaatgtttttttttgttgttgttgtttttgtatttttagtagagatggggtttcaccatgttaaccaggacggtctcaatctcctgacctcgtgatccgcccgccttgacctcccaaagtgctgggattacaggtgtgagccaccacacctgggctttttgttttgttttgttttttgagacagagtctcactctgcagcccgggctagagtgcagtggcacgatctctcctcattgcaacctccgcctcttgggttcaagtgattctcttgcctcagcctcccaagtacatgggattataggcatgcaccaccacgcccagctaattttgtatttttagtagagatgaagtttcaccatgttggccaagctggtctctaactcctcagctcaaatgatccactctcctcagcctcccaaaatgctgggattacagttgtgagccaccacacccagccaaaaattttaaaaaattagccaggcatgtggcacacacttgtagtcccagctacttaggaggccaagatgggaggattgcttgagcccaaaaattggaggctgcagtgagccatgattgtgccactgcactccagcctgagtgacagagtaagaccctgtctcttaaaaaaaaaaaaaaaaagatgaagtcttactggactagaatgagccctaaatccaatgacaagtgtccatctaagaagaggagaggacacagagacacacagagaccatggaagcctctccatggaatgactggaatgatgcagctttgagttgaggaacaccaaggattacaaggagctaccaaaatctaggagagagacaaggaaggattcttccctagaaccttcaaagggagcccagccctgccaacaccttgactttggactttgagcctgcagaactgtaagagaataacaaacttatgttgcttcaaaccaccaagtttgtggtaatttattgcagcagcactagaaaactaatacagttgggtgcttcagaagtgtacctgagacactctgatttgagtaaaagtggtttatctgtaaggtgattgcagggagtgctggcaggggatggaggagatgagatgcagaagggagggcagccagtacatcatgtggaaatgagcaggttattctgcgatatctaggtcttaactcatcttggacaaaccctgagagttatcttatgcaaagggtgagggagctggggtatttatcctccaactcccagccattgttagttgaggtatgctagcagggaaaatgaattctccagaacttctggctgcctgcatgcaccagagcaaagctgtcaggcaaagagtcacaggtacaggtggtatgaagccactggattgacgtgcatggtgtagggacagcctctaagatggccctcaatgttccaacccttgcattaatgccctacccttgagtgtggttagactctatgacttgcttcctgcccatagaatgtggcaaaatcgatgcaatgtcacttctaaaattaggtcacaaaaaagaccacgcctttcatcttgggtgcactcccttttttttttttttttggagatggagtcttgctctgtcgtccaggctggagtgcaatggtgcaatctctgctcactgcaacctccacctcccggttcaagtgattctcctgcctcagcctcccaagtagctgggattacaggcatgggccattatgcccagctaattttttatttttactagagatggggtttcaccatgttggtcaggctggttttggactccagacctcacccacccacctcagcctcccaaagtgctgggattacaggcgtgaaccattgtgcccagctggatgcactccctttcttgccctctcttctgctcactctgagggaagccaactgccaggctgtgagctgcccatcggagagggtcacaaggccaggaaccagaagaggcctctgaccaacagccagtgggcaactgatcctgccaacaactcatgagcttgaaagtggatcctccccagtcgagctttcagatgagatcatggcctcagtcaccaactatttctttttaattgagatgcatccatgcccatttgctttttgttgttgttagttaattaattaattaaaaaatagagatagggtctcactctgctgtccaggctggagtgcagtggtgcgatcaatagctccctgcagtattgaactcctgggctcaagggatccttctacctcagtttcccaagtagctgggactataggtgcatgccaccacacctggctaattttttgtttagtttagtttagttttgttttgagatggagtctcactctgtcacctaggctggagtgcagtggtgcaatctcggctcactacaacctccgcctcctgagttcaagtgattctcctattcagcctcctgagtagctgaaactacaggcccatgccaccatgcccggctagattttgtatttttaatagagatggggtttcaccatgttggccaggctggtctcaaacttctggcctcaagtgatccacctacttcagcctcccaaagtgctgggattatagaggtgagtcactgcactggcctaaaatttatttaattgacaaattaaaattgtacgtatttatggtgtatgacatgatgttttgaagtacatatacatttcagaatggctaaatggagtgaattaacatatatattacctcacatgcctatttttgtgtgtgacaagaacacttaaaatctctctcagtgattttcaagtatacgatacattgttattagctatagtcaccatactgtagaagacatctcttgactgtattcctgtctaactgaaagtgtatagcctttgactaacatctccccagtccctccactctagcccctggtaaccaccattcactctctgttctttttctttcttttttggaaacagggactcactttgtcatccaggctggagtgcagtggcatgatcatggctcactgcagcctcaacctactggggtcaggtgttcctcccacctcagcctcccaagtagctgggactacaggcacacaccaccatgcccatctaattttagtattttttgtagagatcaggtttcaccatgttgcccaggcctgtctacaactattgagctcaagcgatccacctcccttggccccccaaagtgctaggattatagggatgaaccaccacgtgcaatctcggctcattgcaacttctgcctcccaggttcaagcgattatcctgcctcagcctcctgagtagctgggattacaggtgcgcaccaccatgcccggctcatttttgtatttttagtagagacggggtttaaccatgttggtcaggctggtcctgaactcctgacctcatgatccggccgccttggcctcccaaagtgctgagattacaggcgtgagcgactgcacccggatagtaacccatctgtaccccatcactgtagactcccctctttctgtcatccctcacatccaatccattagccagccctgtccactccaactccaaaacccaccctgagcccatagagccttcctcacctgcactgccaccagcctgggacaagtcattcttgtctgtcatctgaattgtagcaaagatctctcctccctatcaagctctatccaggtggatctgctcagccaaggtaggctttttaattctttattttagagacagcgtgtcattttgttgcccagaagggagtgaagtggtgcaatcatagcttactgcagcctcaacctcctgggcttaaatgagtctcctgccttagcctccacagcagctggaactacaggtgcgtgccactgtgctcagctaattttttttttttttgaaatggagtctcactcactctgtcgcccaggcagtgtgtcgcccaggcagtgagtacagtggtgtgatcttgcctcactgttacctccatctcccgggttcaagtgattctcctgcttagcctcccaagtagctgggattacaggtatgcaccaccccacatggctaatttttgtatttttagtagagatggggttttgccacgttggccaggctggtctcgaactcctggcctcaagtgatctgcctgcctcagcttcccaaagtgttgggattacaggtgtcagcaactgtgcctggcctaattttaaattttttgtaaagatgtggtctcgaacccctagcctcaagcgatcctcccacctccacctcctaaagtgctgggattacaggcgtgagccactgcatccggcctcctgcacttcttccttaagcacatgctcacccagtgcttccattcatgcatgggaccagcactcattaagcacttactgtatgtacctgacctctgagtatccaacaggcatttttctcatttaatccttgaaatgaccctactgtcattgtacctatattatagccagagaaacagaggcacagaccagcaaaaccacttacctaaggtgactcagtcaatgccaggcagggctgggatttgtaggttttttttgttgtttgagacggagtcttgccctgtcacccaggctggagtgcagtggtgctatctcagctcactgcaacctccacctcccgggttcaagcgattctcgtgccccagcctctcaagtagctgggattacaggtgtgcaccaccatgcctggctgattttttgtttgtttgttttcttttgttttgagtcagagtttcactcttgttgcccaggctggagtgcagtggcgcgatctcggctcactgcaacctccgcctcccaggttcctgtgattctcctgcctcagcctcccgagtagctgggattacaggcatgcgccaacatgcccagctaattttttatatttttagtagagacagggtttctccatgttggtcagcctggtctcgaactcccaacctcaggagatctgcccgccttggctcccaaaatgctgagattacaggcatgaaccaccacgcctggctttttttctttttttttttttttgagatggagttttgctctgtcaccaggctggagtgcagtggcgcgatcttggcccactgcaacctccgcctcctgggttcaagcaattctcctgcctcagcttcccaagtagctgggactataggcgcatgccaccacacccgactaattttttgtattttagtagagacgggggtttcaccatgttggccaggatggtctcaatctcgtgaccttgtgatctgcccacctcggcctcccaaatgatttttgtatttttagtagaaacggggtttcaccatgttggccaggctggtcttgaactcctgaccccaagtgacttgcccgcttcagtctcctaaagtcctgggattacaggcatgagctactgctgaccccagggctgggatttgaacccacgcagtttctataccagccctggggtcttcattgacattcagcttatgcatccaatgtgttaattctctcacttccaaacagatgggcgtttccaagtgcccagagaccctggcaggtttacatctcttggctttatccagaaggtggtttggtcttcaaggccgggcacggtggcgcacacctgtaatcctagcactttgggaggccaggcaggcggatcaccagaggtcaggagtttcagaccagcctgaccaccatggagaaaccctgtttctactaaaaatacaaaattagccgggcgtggtggcacatgcctgtaatcccagctactcaggaggctgaggcaggagaatcgcttgaacccaggaggcagaggttgtggtgaatcaagatcgcgccattgtactccggcctgggaaacaagagcaaaactccgtctcaaaaaaaaaaaaagaaaagaagagaacagaaggtggtttggtctttctcagctgcgctgatgaacaggcccatttcttgtcctcagagatagggtctagcgtagcaggggagtcaaggcaggtatcactcaactgaaatccacaggaactactcaaccctgtgtaagagcacctgggatgtgttaactctgcctgggagagatttggaaaggcaggaaggactctttttgttcgtctttgttggtttttgtttttttttttttggattgttgtttgttttgagacagagtcttgctctgtcgtacaggctggagtgcagtggtgagatgttggttcactgcaacctctgcctttccggcaattctcctgcctcagcctcctgagtatatgagattacaagtgcctgtcaccatgcctggctaatttttgtatttttagtagagacggggtttcaccatgttggccaggctggtcttgaactcctgacctcaagtgatccgcctgccttggccccccaaagtgctaagattataggcgtaagccaccacagctggcccatctttgtattctgagccagctaaacacacaaaggccagactggggcagggcatggtggctcatgcctgtaatcccaccatttcagcaggccaaagtgggaggattgcttgaggattgcttcaagaccagcttgggcaacatagcgagacccaatctcttaaaaaataacaaaaaattagctggatgtggtggcacacacctgtagtctcagctactccagaggctgaggcaggaggattccttgagcctgggagattgttagcctgggtgacggaatgaggccttgtctcttaaaaaaaaaaaaaaaaaaaggccgggcgcagtggctcatgcctgtaatcccagcactttgggaggccaaggtgggtggatcaccaggtcaggagatcgagaccatcctggccaacatggtgaaaccccgtctctactacaaataaaaaattagctgggtgtggtgttgtgtgcctgtaatcccagctactcgggaggctgaggcaggagaatcgcttgaaccaggtagtcggaggttgcagtgagccgagatcgcgccactgcacttcagcctggtgacagagcgagacatcatctaaaaaaaaaaaaaaaaaaatgccaaagtgggtaaatgacttgccgcaggtcacacagcctggaagtccgaaggagcctttgcaagaaatcttgctgctttcaaccctccttgttagtctcccaggctgctgtaaggaagtgctacccattgggtggcttaaagcaacagagatttattctcttccacacctggaggccagaagcctggaatcaaggtgttgacaggaccatgttccctctgaaacttgcaagggagactccttccttgcccctgcctggccagcgggcattggtggtggccagcaatgctgggtgctccttggcttgtagatgatgcatctctccaatctctgcatcatccagtctctgcctcctccatcacatggactctccctcgtgtacttgtgtctattctcttcttaccaagacactggtcgtattggctgggcgcagtggctcacgcccgtaatcccagcactttgggaggctgaggcgggcggatcacttgaggtcaggagttcgagacctgaggcaagttgcaatttttagccccattttatagatgaagccactgagtcttggataataacatgctcattcttcctggaaccacccagaagacttctgctggagtcttattggccggaagagtgtcacacagccatctctagaaggaagggagttgggaggctgaggtaggcggatcacttgaggtcaggagtttgagatcagcctggccaacatgacgaaaccccgtctctactaaaaatacaaaaaattagccgggcatggtggtgggtgcctgtaatcccagctactcgggaggctgaggtaggagagtagcttgaacctgggaggcggaggttgcagtgagctgagattgcaccactgtcctccagcctgggtaacagagtgagactctgtccccaaaaataaataaataaataaataaataaataaaatagaagcaagcgggacttgaaggctggaataatggcaaggggagctggaagaggggctggaagacaaaaaaaatacataaacacataaataaataaaatagaagcaaggggggctggagggcaaggattaggcagggcacactgacacttaaggagccctgtgttagcaaaggaaagagataggtgtgaatttgacaaactgtgtctcccacaattctccctgcctctgaatctggatgaagtatattgagtgcccgctaaggactaagcactatgctacagactcacggcaaattattccttttttttttttgagatgaagttttgctcttgttgcccaggatggagtgcaatggcacgatctcggttcactacaacctctgcctcccaggttcaagcaattctcctgtctcagcctcatgagtagctgggattacaggtgcacaccaccatgcccggctaatttttgtatttttagtagaggtggagtttcaccatgttgaccagactggtcttgaactcttgacctcaggagatctgcccacctcggcctcccaaagtgttgggattacaggcgtgagccactgcacccagccttcaaggcaaattcttttttttttccccctgagatggagtttcactctgtcatccaggctggagtccagtggtgtgatctcagctcactgcaacctctgcctcctgggttcaagcgattttcctgccttagcctcccgagtagctgggattacaggtacacgccaccacgcccagctaagtttttgtatttttagtagagacagggtttcaccatgttggccaggcggtctcaaactcctgacctcagtgatctgcccaccttggcctcccaaagtgttgggattacaggcatgagccactacgcccggccaagacctcaactcttaaataaataaataaataaagccaataccatccctgcagagttagctttcaggagggcttatattctagttgctgagggatggggtggctcagaaataatattggttatgggaataacttgtactgtggtccaggcactgctttgaggacttctcattcactaagtcaattattcattacccgctatataaggtgggttttttgtttttgtggattcttttttttttttttttttttgagatggagtctcgctctgttgcccaggctggagtgcagtggcgcgatctcggctcactgcaagctccgcctcctgggttcatgccattctcctgcctcagcctcccgagtagctgggactacaggcgcccgccaccatgcccggctaattttttgtatttttagtagagatggggtttccccttgttagccaggatggtctcgatctcctgacctcgtgatccgcctgcctcagcctcccaaagtgctgggattacaggcgtgagccaccacaccccgccttgcagatttttttttagagactacaggtgtaagccattgtgcctggcttttttttttttttttttttttttttttggtagagacagggtcttgctatgttgcccaggctggtctcaaactcttggcctaaagggaccctcctaccttgggctcctgagtggctgggattacagactccggacactgcacccggctccaggtgggttttattaccatcctcattttataaatgaggaaaggggctcggagaagttaagtaacatgcccaatgtcacacagctaataactgtgaagccgggatttgaacccaggttcttggattcgagagcataagaccctgagttcaggtaagtaatacaatgtcagctggctgtaagacagatgatggtaaataacagggaccactaggcctggcaaggtggctcacacttgtaatcccagcactttgggaggcagaggtaggcggatcacctgaggtcaggagtttgagactagcctggccaacatggtgaaaccctgtctgtattaaaaatacaaaaattagccaggtgtggtggcatgtgcctgtggtcccagctacttgtgaggctgaggtgggagaatcgcttgaacccaagaggcggaggttgcagtgagatcacaccactgtgctctagcctgggtgacagagcgagactccatctcaaaaaaaaaaaaggccaggggcggtggctcacgcctgtaatcccagcactttgggaggccgaggcgggcggatcacgaggttaggagatcgagaccatcctggctaacacagtgaaacccagtcaatactaaaaatacaaaaaattagccgggcatggtggcgggcgcctgtagtctcagctactcgggaggtcgaggcaggagaatgccgtgaacccgggaggcggagcttgcagtgagccgagatcaggccaccgcacttcagcctgggcgacagagcaagactccgtctcaaaaaaaaaaggccggcgcggtggctcatgcctgtaatcccagcgctttggaagaccgaggcaggtggatcacctgaggtcaggagttctagaccagcctggccaacatggtgaaatccggtatctactaaaaatacaaaaattagctgggcatggtggcatgcgccggtaatcccagctactcaggaagctgcttgaacccaggaggtggaggttgcagtgagccgagattgcaccactgcactccaacctgggctacagagcaagactccgcctcaaaagaaaaaatacaaatacaaataaaataaagagaacagccagtgggaagtcccagaaatgggcacacactgggtgtgtctggggtgcagtgaggggccccctgtggctgaggcgaaagtctagggattattgcacccactttgcacgtgtgaccttccacaattcttcacacagcgactccttcacaacagtctcatgacataggtttttataattctcctctcttgacgggcggggaaactgaggctcagggtggctaattgagccacagccagaaagcaatggagctccaatctgaatccaggcagcctgcccccactgccgaactccaagggaaacacagtagggagccaatgccagcaggctgggagggctgcctggaggaggtggatgtcaccaggacctgcgggaggaccctgaggagcagggagggagggagctgccgctgaccaaggcacaaaaacatgttcctggggcagttcttggaaggcagatttccaggtgcctgcccccaatgtggccctgcctcccgctccccctggccccctcttcctagagggaaggcggcaagaggcgcttcattagcgcctctgaggccccagcagccccggggggatgaaaagggcctaggaggggagccgtcctaattttggcacacctggcagggggcccagggccactgaaagggattcagctggggccggctgggcaggccccgtcattgttccggctagatccgcggtcagggcttcaaatgcaaaatcgggctggggatggggtgggggcgccggtggcctctgctcttcctttaatagaccaaaggactctggcggcttagctctttttcctaatttaaaggtattttcaggcgtttgggagctcccctacggcgaagcaggaaggctgggaagtggggggccttgaaactctcttcgtggttgcccgcggaggatggaggaaaaggcggggaggaggggggctgaggttggtctggggtcactggtggggcgctgggcaggtggagacccgtgttgagttctcggctgtcctctgccccagtttccctctctggaacctctgtctggtttctggaaccgtccccagcaggtaggacggatgcaggtgtgcccaaacggcagtttcttcctaaggagctctttcgggtcaactccggaggccttgactagggaggcagatggaggaggcttgatccctctcagcatggcagccgtggtgccaaggcaggaaggagggtagggaggcaagccaatggggtgcagcggcctccatgccagaaaatgggggctccctggatcatctcctcggcgggagggtgcacggggaccaggagagagaaccaaaggaccccgctggaggggggcttggagcctagagacagttgagggggtactgtcttcccctctctcctggccacgctgcccggtcggcctttttctcccctttccctccccttttgcccccacccccgcctgcccccctccaggccccagcgccccccactcccaaccccccggcctgctctcctgcctcccccgtgccacctccttgggctgcgtttctcttccctcctccgagttccaggccatcccctctccccctccccagcccgccctcctccttctgactggctcccgcctccctaacgctctctcagcctcccagccccctcctccctccctctctctctccctctctccctttccttccttcatcccagcctctcttcccaccttccccagcaggagagagggggccgcgctccccccagcccctccccctctctccctggggccgccgccatcttgcaggatgctggggagggagccgcgtgcaggccatggaaacaatgcatcttttatgaagcgatccccgctcctcgcctggaaaccttgcattaatgcggcattgatttccctcgtaatagagggggctctcccgcgcccccaacccgaggggcgcaagaagggagggggccagtttcgggggcgaggagggaaaagtggagggtgatggagtcatcgctccgggctcccagctctgcagccggcgccctccccgcgccccgcctggagacccccaccccaccccgcaggtggaggttcccagagtgggggaggggttccggcgcgaggccctctagtaacttctgggctgagacccagccacagagtcccggccgatgggatccccacccccctattctcagccctggcattggccagaaagggcgcaggagaccctcggctgcccctggggcccgctgtctgcggccaggtcctctgggacacgtgtccccccctccccccagaaccctccgaggttccccagctcctccaagccctgtttccttcccctcttccatcttgccgcctcactcccatccttacagctcctgccttcctcgtcctctcctggctccccccttccccttccctgctgcctgccccctccctccacacccccttccctgcgtgctaatggcccggtggcaggcggctccgtggctgtttccgggggaggcgggtttgcagccaggggagatgttggagcggtttgaggaagaagaattatacatacataaatctgggataatgacggtgttgctaatggggcgggcggcggcagctcccggcagtgcccccccacaaacacacaccccatcacacacactcagggaccagcctggcttcctgacgcgtttgagggtccgtgggccccgatcatctccttgactggccctgaaacatccctgctgcagatacggggtccatgctcatttgtgacatcaatgaaacatccccctccagccccccaattcaatttgcggcttgccactttgcttgccctgtggcctaggggtgagtagttaccccagcaggacaggtgtgttcacttgggtcttattaccccaccaccagcctggaccccccactcctctaggttttctgaggtcacaccacccaccacatgacatcttttgcataactgaaggaaggtcagacggattttcttaccctttctccatttcatagctgtgtgaccttaggcaaattacttaacctctctgagattcagttctctctacttgtaatttgggaataattatgttcaaagaacctgaggctgaggtgggaggatcacttgaggcaaggagttggagaccagcctgggcaacatagcgaaacccctgtctcaaattaaaaaaaaaatttttttgaaaaaattagtcaagggccaggcacagtggctcacacctgtaatcccagcactttgggaggccaaggcaggtggatcacttgaggtcaggagttcaagaccagcctggccaacatggcgaaaccctgtctctactaaaaaaaaaaaaagtacaaaaattagccggtgtggtggtgcatgcctgtcatcccagctactcgggaggctgaggcacgagaatcccttgaaccgggaggcggaggttgcagtgagcggaggtcgcaccactgcactccagcctgggcaacagagcaagaccctgtccctaaaaaaaaaaaaaaaagagaacgtgaattcacccacttctttccacttttgtgcttcccaactccttcatcacttgcctggatttactgaggttgccttggccacaggctcctggcttctgccctggcctccatccgtccttaccacagcccagaggtatctttgaaaagacaaggaagttcacgttttccttctattgagaacgctgcaatgcaccgccatggctcttagattaagaccgaaatccctcactcaacctccttgggattcctctctccatcgctaagtccactccagctacactgagcctttgcactggttgttcccacttcctgcaacacccttccccctagatctcacatggccaaccagctctgccttcttcttcacgcctcagctccatgtcaccacccctagtcaatctccattaactctctgatatcgcttacttatttgttttcatgaccattccctcctggaataacatctctctctctctctctcttttccttccttcctttttccctccctccttccttcctttcttgcttccttccttttttgttttttttgacagagtctcgctctgaacacccaggctggagtgcaaaggcacgatcttggctcattgcaacctctgcgattctcctgcctcagcctccccagtaggtgggattacaggcatggctgtacactcagctaaattttgtgattttagtagagacagggtttcaccatgttggccagggtggtcttgaactcctgacctcaggtgatccgcccgcctcagcctctcaaagtgctgggattacaggcatgagccactgagccaagctgtttctttcttttttgagatggtgtctcactctatcacccaggctggggtgcagcagcgtgatctcggctcactgtaacctccaccgtgttcaagtgattctcctgcctcagcctcccaagtagctgggacaataggcaggtgccaccattcccggctaatctttgtatttttaatagagacaggttttcaccatgttggccaggctggtcttgaactcctgacctcaagtgatctgtttgtctcggcctcaagtgatctgttcatctcggcctcccaaagtgctgggattacaggtgtgagccaccgcacctggccaaaatttataaaccttgactcttattctcggtgtgtcccacaatacctggcacctactagattttcaaatatgtgttgactgagtgaattaaataaataacgttgtgactatgtaaggatataagtgatgtaaagttcttggcaggtcaccagcattcaataaaccaagatgctgggcacagtggctcacgcctgtaaccccagcatgttgggaggccaaggcaggaggatagtttgaaccaggggttcaagagcagcctggacaacaaagcgagaccctgtctctacaaaaattacaaaaaaattagctgggtgtgatagtgtatacctgtggtcccagctattcgagaggctgaggtgggaggatcacttgagcctgggcggttgaggctgcagtgagccaggttcctgcgatccagcctgagttactgagtgagaccctgtccacatccccacaagaggtaaacttatgttcatcaaaagacatgtacaaggatgttcatagctgctttatctacaataaccattcactgcaaacaactcaaatatctatcagcagtaagataaatacattgtgatacatctccacaatggattattatacaaccaagaaaaagaacaggaaagcagacatgacaatagattctcacagatacaatgttgcgtaaaagcaagacgacaaaccatgtatttccacttacacaaagttcaggggtaggcaaaactaatctatgatgaaaatgtcaaattggaggatactgactgagaaagagcatttgggaatttcctggagggacaattatgttcttctggtctgcatggtggatacacaggtatacacgtgtagaaattcaccacgctgaaatttatgatttgtgcactttaccatattcattaaaaaaaaaaaaaaaaaaaggaagccagtcatgatggcttgtgcctgtaatccaagctactcaggaggctgagatgagaggatcgcttgaggccaggagctcgagaccagctgggtaatgtagtgagaccctgtcttcatttaaaaaaaaaaaaaaaaaaaagattaggctgggtgcagtggctgtaatcccagcactttgggaggccaaggtgagcagatcacttgaggtcatgagttcgagacttgccttgccaacatggtgaagccctgtctctactaaaaatataaaaattagccaggttaggccagggatagtggcttacgcctgtaatcccagcattttggaggccgaggtgggcggattataaggtcaggagtttgagaccagccaatatggtgaaactccgtctctactaaaaatacaaaaattagtcaggtgtggtggtaggcgcctgcctgtagtcccagctactcgggaggctgaggcagaagaattgcttgaacccgggaagcagagattgccgtaagctgagatcgcgccattgcactccagcctgggcgacagaggaagactccgtctcaaaaagaaaaaaaagttagccaggcattgtggaggttacctgtaatcgcagctcctcaggaggctgaggcaggagaatcacttgaacctgggaggtggaggttgcagtgagccaaggtcacaccactccactacagcctgggtgacagagcgagactccatctcaaaataataatcataataataatgaaaagaaatgatgctggatgcagtggctcatgcctataatcccaacactttgggaggccaaagcaagaggatcacttgaagccaggagtttgagaccagcctgggcaatgtagcaggaccctatctctacaaaaacatatatattttaaaaattagccaggtgtggtggtgcatgtctgtagtcccagctactcgcatggctgaggcaggaggatcacctcagtccagtaatttgaggctgcagtaaggtgtgatcacaccactggactccagcctgggcaatagagcaagaccctatctcaaaataaaagaataaaatatacaataaaaataaaacagagcaaagagaatgtcccctagagccatgtgtgatccatacgctttgtgaatcctgacacctcctctccttcgaggttgtacaactgtcttccaaagttggaaaaaaaaaatgtttaaagctgcccagattcaggagggaggtccaaggggtaccagtgccctcccccatttcccaaggacgacaagggttgccagcctcccttggccttggggtgtgcgcagctcggcgtgagggccagtggttgatcttgaagtttctttcctactccctcatccctttcctgcccaagctgtggtcccagctgactcccctatcagcgactgcgagtgagttcggttgttatggcaacggggctgcggagatccccgggaacctgctggtccgcctcattgcctcaccgtatggggagctgcttttcccccttaaaaatgaaacgggagtgggatgggggaggaacccccttcttctgctctggaatgaaatgcctccctcacctgctttgtcccaaacccccggtttggagaggagggtctggatgggacccagactgtggataaggatggagggaggagaactcctgctccctgggttttagcagccttcccaggtcccaccgaacacgaggaacacggtctttctccagctccaacttttctcatctgtccattcattttttccacaggaggcatgaggaggtgagagatggaaagaatgctgcctgtcatttggagtcagaaggaaaagaaggttgagggtctggcagctttgctctagtggttttttcctgtttcaccttttacaaaatcgagataattgtttctacttggtagcgatattgtgaggtgtaaaatggattaacacatgcaaaatgcttaaagcaacttctggcatatggcatatggtgatctctcaaccaatcgattgttattttattattatttttttgagacggagttttgctcttgttacccaggctggagtgcaatggtgtgatctcggctcactgcaacctctgtttcccggattcaagcgattttcctccttctccaggtgtccaccaccacgcccagctaattttttgttgttttttgttttgttttgttttgtttgtttgagacagagtctcgctctgttgcccaggttggagtgcagtggcgcgatctcggctcactgcaagctctgtctcccaggttcatgccattctcctggctcagcctccccagtagctgggactacaggcgcccgccatcacgcctggctaatttttgtatttttagtagagatggggtttcaccgtgttagccaggatggtctccatctcctgacctcgtgatccgcccacctcggcctcccaaagtgctgggattacaggcgtgagccaccacgcctggacaattttttgtatttttagtagagacggggtttcaccatgtcagccaggctggtctcaaactcctgacctcaggtgatccacccgcctcagcctcccaaagtgctggaattacaggcgtgaaccaccgtgcccagcagggagaccctgtttctacaagaaaaaatttactgtgatcccagcactttggaaggccaaggtgggaggatcacttgagcctaggagttcaagtccagcctgggcaacatacatagggagaacccatctcttaaaaaaagaaaagaagaagaaagaagaaagaagaagaagaagaagaagaagaagaaagaaaaagaaataattacatgtaaccctaccagcagttttgtgggattgctatgatcatacccatttcacagattaggtaactgaggttttagtgccctggagatgaaggcattctctagtctcccagaagccctggactcttgaacaaccccaaatgctaaactcagcagtaaaatggctggtggctcctacctgagggttcacagaggggctgcctgtgcttgtctcccagccctttcttcctgtgtattaagagggttgcagctacttcagggccagcgtctccacaagtcatcatgacggcttcctgatcatggctctctctctctcttttttttttttaagacgaagtctcgctctgtcgcccaggctggagtgcagtggcatgatctcggctcactgcaagctccgcctcctgggttcacgccattctcctgcctcagcctcctgagtagccaggattataggcctgcgccactgtggccagctagtttttttgtatttttagtaaagatggggtttcactgtgttggtcagggtggtctcgaactcctgacctcaaatgatccacctgccttggcctcccaaagtgttgggattacaggtgtgagccactgcgcctggcctggagatctgtttgtcatattggtgaacacttttaaacaaccagatcttgtgagaactcactcactatcacaagcacagcaagggaggcctctgaccccatgatccaatcacctcccaccaggcccttcctccaacaccagggattacaattcaacataagatttgggtgggggggatacaaatccaaaccatatcacaggacctgtgttcccacctcctaaacctgggtgggacttgtgactgctccaaccaatggagtatgaaggaattgagtcaatgaggttttgaaggttgagtcatagaagatggctttcacctggcctgtctttctccctctctctctctctctttcttccctccctccctccctccctcactcccttccttccttcttccctcccttcctcacttcctctctctctccctccctccctctctctttctcccttccctcgcctcccctcgcctcccctcccctcctcttcctttcttcctttcttccctgcttgcttgcttgcttgctcgctctgctgcccaggctggagtgcggtggtgccatcatagctcactgcagcctcaaactcctgggcacaagtgatcctccccagcctccccagtgcctgagactacaggcacatggtgcctcatctgcctgatttttaaattttttgtagaaatggggtcttgtggcagacgtggtggctcacgcttgtaatcccagcactttgggaggctgaggcaggtggatcacctgaggtcaggagtttgagaccagcctggctaacatggtgaaaccctgtctctactaaaaatacaaaaattagttggcaggggtggtgggcgcctgtaatcccagctacttgggaggctgaagcaggagaatcgcttgaacccgggaggcggaggttgcagtgagttgagattgtgccactgcactcctgcctgggcaacaagagtgaaactccgtctcaaaaaaaaaattttttttttttgtagagatgggcgtctccttatgttgcccagactggtcttgaactttgagcttcaaatcctgcctcagcctctagagtagctggaattgtaggcaagagccactctgtctggtggtttttaacagttttttttttttttttttttaagagacagggtctcaccaggcgcagtggctcacgcctgtaatcccagcactttgggaggccaaggcaggtggatcacctgagatcaggagttcgagaccagcctgaccaatatggtgaaaccctgtctctactaaaaatacaaaaattagctgggcgttgtggcatgcacctgtagtcccagctactctggaggctgagacaggagaatcgcttgaacctgggaggcagaggttgtggtgagccaagattgcaccactgcgctctagcctgggcaacagcaagactccatctcaaaaaaaaaaaaaaaaagagagacagggtctcaatttattgcgcaggctggagtgcagtggtgcaatcatagctgcagtcatagctcactacagcctcaaactcctgggctcaaggatcctcccagctcttctaaaatattagccggagggtgggtagcatgtaccaactcttgggcttagtaatcctcctgcctcagacttccaaatcgctgggattacaggtgtgaaccactgcacctggccctcttgtttctaaggatatcagtcattggatttagggcctaccctaaaatccaagatgttctgatagtgagatctttaacttaattccatctgcaaagaccctatttccaaataaggccacattcacagataccaaaggttacacatttcttctttcttcttctttcctcctcctcctccccttcccttccttttttttttttttttttttttgagacggagtctcgctctgtcgcccaggctggagtgcagtggcacaatcttggttcactgcaagctctgcctcccgggttcacgccattctcctgcctcagcctccacaatagctgggaatacaggcgcccgccaccatgcctggctaattttttgtattttttagtagagatgaggtttcatcatgttagccaggatggtctcgatctcctgacctcgtgatccgcctgcctcggcctcccaaagtgctgggattacaggcgtgagccaccgcgcccggccccctttcttcttctttcttcttttttccttcccctttcccttctcctcctcccccgcctccctccccttccctttcatcttctttcttccttccccttcttcttctcctccccctccccttccctttgttcttcttctttcttctttcttcctttcccttccccctgctcctcctcctgctcttcttctcttttcttctttcttttcaggctcttaccctgttgcctaggctagagtgcagtggcacaatcatgtctcactgcagccttgacctcccgggctcaggtgatcctcctgcctcagcctcccaagtagctgggactacaggcatgtatcaccacacctggctaatttttaaaatttttttgtagagatggggtattgctatattgcccaggctggtcttgaactcctggactcaaaggatcctcctgcctcaggctcccaaagtgctgggattacaggcgtgagccaccgggcccggcccatacatatctgctttggggccacaattcaacctgctacaatcacaatagatgttgtgatttttccacctctttctctttttttggacttgtttttcatagtctggggcataattcatttaaaccattttctttgattgatgaaccgtacattgttgccaactctttgttctttcctagttttttgtctgcactgtattgtactggagaacaaatatttctccaagaagtgttcccactggtggaaggacaggctggtttttggtttttgggtgttttttgagacggagtttcactcttgtcacccaggctggagtgcaatggcatgagctcagcccactgcaacctctgcctctcgggtttaaatgattctcctgcctcagcctcccgagtagctgggattataggcgcctgccgccatacccggctaatttttgtatttttggtagagacggagtttcatcatgttggccaggctggtctcaaactcctgacctcaggtgatccgccggccttggcttcccagagtgctggaattacgggtgtgagccatctcatccggctgatgggctggtttggttttttgttgttgttgttgttgttgttgttgagacagagtcttgctctgtcaccaggctggagtgcagtggcgtgatcttagctaactgcaacctccgcctcctgggttcaagtgattctcctgcctcagcctcccaagtagctggaactacaggtgtgcgccaccacacccagctaatttttgtattttttaagtagagacgggtttcaccatgttggccaggatggtctcaatttcttgacctcaggatctgcccaccttggcctcccaaagtgctgagattatgggtgtgagccaccgcgcccggccgatgggctgtttttgtgttctgggttgggtaggataagatagttcccacttggctttctagatccacttttcacgcgcctctacttggctctggttctttggacagatctggggttccctggtcctctgccttccatctggggtcagacaactgagaggagatggatggcaggacgggagtgaattcagcttcaagcctgtcctgagaacaggtcactcacctgacccagagccatggtttctggggatggcaacatctgcccagtgtcccagggtgctagggttgtgattgaagccttttaaaatttttatgtatttagttagttattgtttgtttgttagtttgttattgacacagagtctcaccctgtcacccaggctggagtgcagcagcaaaatcatggctcactgcagcctcaacctcctgggctcaggcgatcctcccacctcagcctcccgagtagctgggagtacaggtgcaggtcaccacacccagctaattttttaatttgtttctagagacggggtattgccacatccaggctggtcttgaactcctggactcaaggagtgatccgcccgcctcggcctcccagagtgctgagattataggagtgagccactgtgccggcctttgaagcttttcctgcaaattctcttatctttatgacagacctcagtcacccactgtgattgcaggatgcttcccatggggatcgtaaccaaaaagcattcttctccaggagcttttcctgatagcaaatgcgttagattttgggaacatctaaaaataactttttcttcttttttgttattataggcaggaaatacgctatgtgtaaaccagaagactataaagatctccacatttccagccctgaggaaaccactgctgatctttaggtgtctatcctttttgtcttttttttttttttgagatggtgtcttgctctgttgcccaggctggagtgtagtggcgtgatctccgctcaccgcaacctccgccccccaggttcaagtgattctcctgcctcagcctcccgagtagctgggattacaggcgcctgccaccatgcctggatactttttccatttttagtagagacggggtttcaccatgttggccaggctggtctcgaacgcctgacctcaggtgatccacccgcctcgggctcccaaagtgctgggattacatgtgccaccatgcccacccttctttttttgttttttgtttttttgttgttgttcttgttgtttctaagacggagtctccctgtctgtcacccaggctggagtgcagtggcgtgatcttggctcaccacaacttctgcctcccggattcaagcaattctcctacctccgcctcccaagtagctgggactacaggcgactgccaccacagctaatttttgtatttttaatagagatggagtttcaccatattggtcaggatggtctcgatctcctgacctcgtggtctgcccgcctcagcctcccaaagtgctaagattacaggcgtgagccaccgcgcctggccattttttttgtttgttttttgttttttttgagacagagtctcccactgtcgcccaggccggagtgcaatggtgccatcgcggttcattgcaagctccgcctcctgggttgacaccattttcctgcctcagtctccctagtagctgggactacaggcacccgccaccacgcctggctaattttttttgtacttttagtagagatggggtttcaccatgttagccaggatggtctctgtctcctgacctcgtgatccgcctgcctcggcctcccaaagtgctgggattacaggcgtgagccaccgcgcctggccccccccttctttttttttttgagatggggtcttgctctgttgcccaggctgggatgcagtggtgtgatctcggctcactgcagcctccatcttccgggttcaagggattctcctgcctcagcctcctgagtagctgagattacaagggcgtgccaccacacctggctattttttgcattttttgtagagacgggtttcactatgctggccagactggtcttgaactcctgacctcaggtgatctgcctgcctcagcctcccaaagtgctgggattacaagcctgagctgctgcagccagcctccctcttgtctttctcaggacagggctctgggatcagacagagccgggcctgaatgcctgcctgaccacgatatgctctgtgagcttgggcaagtgtctcaacctctctgagcttcagtttcctcatttataaatggtgtaagcatagtgccaactttgtcagattgctgggtgtaaatgccctgaggttgataaatgtcggttcctactatgtcaccaggctggagtgcagtggtgttatagctaactgcagccccaaactcttgggctcagacgatcctccccgtcagcctccctagtagtagtatgccatgactgtctaatttttttttttttttgagatggcgtctcgctctgtcacccaggctggagtgcactggcgcaatctcagctcactgcaagctccgcctcctaggttcacgccattctcctgcctcagcctcccaagtagctgggactacaggcgcccgccactacgcccggctaatttttttgtattttttagtagagacagggtttcaccgtgttagccaggatggtctcaatctcctgaccttgtgatctgcctgcctcggcctcccaaagtgctgggattacaggcatgagccaccgcgtccagccatgcctggctaattttttaaaaggtttgttttagagacggggtctcgctttgttgcccaggctggtctcgaactcctggtatcaagtgatcctcctcctcagcccctcaagtatctgggattacaggcacaagccaccaccccggctacaggaatgttatataacagatgttcaaattcttcttcaggctttctatagataacaggatttcagcccctcttctatgtgacccaggccaagttttggtcttgttccacagtcctagaacctgccgtgtttttttgttttgtttttttttttttgagacggagtctcgttctgtcgcccaggctggagcgcagtggcacgatctcggctcactgcaagctccgccccccgagttcacacagttctcctgcctcagcctccgagtagctgggactacaggcacccgccactatgcctggctaatttttttgtatttttaatagagacggggtttcatacctgccattggtttttaagatcttatgtctgggccaggaatggtgactcacacatgtaatcccagcactttgggaggccaaggtgggtggatcactggaggtcaagagtttgagaccagcctcgccaacatggtgaaacctcatctctacttaaaatacaaaaagtagctgggcaaggtggtgcacgcctgtaatcccagctacttggcaaactggggcatgagaatcacttgaacccgggagttggaggttgcagtaagctgagatcatgccactgcactccagcctgggcaagagagggagaccctgttgaaaaaaaaaatttaaggccgggtgcggtggctcacgcctgtaatcccagcactctgggagcctgaggcaggtggatcacctgaggtcaggagttcaagaccagcctggccaacataatgaaacccgtctctactaaaagtacaaaaattagctaggcatggtggcgcgtgcctgtaatcccagctacttaggaggctgaggcaggagaattgcttgaacccaggaggcggaggttgcagtgagccgatattgagccattgcactccagcctgggcaacaagatcgagactccgtctcaaaaaataaataaataaataataaatgtaagtgagaccaggtagactggtgcatgcctataatcccagcactttgggagactgaggtgggaagatggcttgagcccaggagtccaaggctgcagtgagctatgaccgtgccactgcactccagcctgggccacagaatgatagacaccttatctcttacagaaaaaaaaaaaaaatcaagtgaatgtttcattgagtgcttactaagttccatgcacaaaggctaaacaccttgacagacactattttctataacagtcacaagaacccatttgaaagaaaggagggctgggcgcggtggctcacgcctataatcccaacactttggaaggctgaggcaggcggatcacttgaggtcaggagttccagaccagcctggccaacaaggtgaaacccggtctctaccaaaaatacaaaaattagctgggggtggtggctggcgcctgtaatcccagctactcggaaagctgaggcaggagaatcgcttgaacctgggaggtggaggttgctgtgagcggagatcgtgccactgcactctagcctgggcaacagagcaagactctgtctcaaaaaagaaaaaaaaagagaaagaaagaaaggaaggaggatcaaggcactgcaagtaagtggaggaggaggcaagatttcactccatcctttgccgtgagtactgtcggtatatccccctaagttgtgccttgtctccatttgacatcaccaagcttgttattattgtgtctaaaccacaagcaaattggctataagtgagggccacaaccatcagttcaacttgaccagaatatagtaaccacccaccacatgctagaccttatacttgtcaaggaaaaacagctcagatctcccaccttcctggagcttataagacttcggggtcacctcctttagcttatgcatagacttttattttattattatttattttcgagacagggtctcgctctgttacccaggctggaatacagtggtgtgatcttggctcactgcagcctcaacctcctgggctcaagtgattctcctgcctcagcctcccaagtagctgggaccacaggcatgcgccaccacacctggctactttttgtatttttagtagagatggggtttcaccatgttgcccaggctggtctcaaattcctgacctcaagggatctgccctccttggcctcccaaagtgctgggattactttccaggtgtgagccaccgcgcccggcctgcgcagacctttaaatatgcgcttcagttcttagagagttttaactgcactggatgctaagttgagtttcagataaaggtgtcagaacaatggctgggggacaataaggtgctgttactggtgatgccttgtctcgggagggagcaattttgggagtgggaaggggacaaaagaaactgtagtccctagggataagggctgaagccctggtccccaaatgcttgcatttggatcccagattcattatttacttgtggtgtgaccttggacaaggcctctcattgtcccgtgcctcagtttctccatctgtaaagtagacctggtcttagtaacctgctgcctagaactgtggtgcgaactgagggagctatgcaaagctttagacagtgactggttggcggcaagcaatcaatcaatgaagcctccatcacagtgatcccttgggctccccagggagtagcagtttggaggacccagattctgaacccacagagttggtgtggaagaggaagagggagcctggtgagccccccacttacacccccagaagccttggagccaaagcagccggaccccagccccagcttcagaggagctgccttgggggtggggctgccccggggctggcccagccccagcaagcttgttaattacttctcagggtcacggtcttaaggagcccctccgaggggatctttgcccagccctctgtttattgatcgcatctaatctctccgcaggcgggcgggcctctaaatcctgcttaactctcggttcctgccctttccgggcagggaggcccccgggctgggtttagctcgcagcgaatgagggctggaaaactggagcgcattgggagacctctagggcccccctaaaacagagaagggatggtgggttccccccccacccacaagcatctcgggactcccaacacctacccacctgtgggcgaggacaccgctcgtttttgcccctcccaatccccgatcttggaatccacttcttgtggctccagaatccaggtagacggcccccacttccccctcggccagccctggcctcccttggtccccatcaggggaaggaggatttgggagctggggagccgccctgacttgctgttctcctttccttaaagaaaccagcgccgctggagggagtggagcccctggcccccggcctggctcggctctttgccgaggtgattaggatgcgtcctccgagggcgcacggctttaacccgagttgccagcgcttttcgggccccgggcgatgtcggttgttcagggggctctctgggtgcctggctggcctccgttcccacctttgaagtgagctctggttggatggtgggaggagcgggggcgaggcggggtgttctgctgggccgggtctgggaggaattcgcgggaaatgcgggggcttaatgggggaaacagaggcagtatcaaatagacggcctgctgacatttttaaaaatgtttttacaatttttgtttgtttattttttttgaaaccaggccttgctctgttgcccaggctggagtgcggtggcgtgatcatagctcactgcagccttgaagtcctaggctcaggtgagcctcccaccttggcctcctgagtagctgggactacaggtgcatgccaccacgctatgctaaattttgttttctttctcggtagagaaggggtctcactatgttgcccaggctgtggcaggctgagcatgagtggctcatacctgtaatctcagcacttttgggaggctgaggcaggattgcttgagtccaggagtttgagaccagcctgggcaacatagtgagaccctgtctctacaaaaaaaaaaaaaaaaaaaaaggcaggtatggtggcacacccctagtcccagctactcggggagctgaggtagtaggatcacttgagcccaggagttttgagtctgcagtgagctatgatcgtgccactgcactccagcccgggcaacagagtgagaccctttctcaaaataataataataacaataaaatataaaataaaataagaaacaaaaacttggaagacagagcagcctaggttcgaatcctgcctccaccacccagcactgggagatcctgagtgagtgactttgcttcttggagctctctcctcgcctctgacttctcagctgctctgggtcaggaactgaatgactaaaagggcctggttcagaatgagtgctcctcctggccaagagaggaggaggaaggacaggggtgggtgggacagctgtagggatccgggctggtgggttggggaggttgccggctcctaccttttagagctcccaggctgtagaccaaaactgacatgaatacctgctcttgcccagcggatgtggatgcccagggggtctctgggtggggaagaagtgggtgtctattggcccagtggtaaaaggtctaagtaaaggatctgggtcttcagtttatatttccctaggaatgtgtgatggagcgctatgaccagacatgagtgtggtcagagatcagaaccaggcaccagtgtgccctgacctgtgcctcagtggttgcacattcctggtgcacacctggtgtatacctggcacacagcacatacctggtgcacacctggcatatacgtggcacatgcctgccacattcctggtgcacaccgggagtatacctggcacacacctgccacattcctggtgcacacctagcgtatacctagcacacacctgccacattcctggtgcacacctggagtatacctggcacacgcctgccacattcctgatgtacacctggtgtacacctggcacacgcctgccacattcctggtgcacagctggtgtacacctggcacacacctgccacattcctggtgcacacctggtctatgcctggcacacacttggtgtacacatggcatatatctttcaggctttcagccactgatccatcttggtcttgctcacccagtgtcagagaggcatcaggtacctgagtgagatcacctttcttgatgaaacacaaaattgggaaccacataaagagcactcactatataccaggtgctgtcttaagtgagttaactttcattaactcattttattttcacaagatgctgttagttggacgccattcgttctgttggccagatatttcctgctcttgcctttcctgtgagcaagatagtataattgagtacccccacttctctttttcttttctttcttttttttttttttgaaacagggtctcactctgtcacccaggctgaagtgcagtggcacaatcatgatcatggttcacttcagtgcagcctctatcacccaggctcaggtgatcctcccacctcagcctcctaagtagctgggactacaggcgtgttccatcatgcccggctaattttttgtagcgatagggtctcattatgttgcccacgctggtcttgaactcctgagctcaagccttctactttcctcagcctcccaaagtggtaggattacaggcatgagccactgcaaacagccacccccatttttctaagatatggtttattttttctctctctctcctcttttgtcattccctggttccccacttcctactcagccctttagaaatacaaatataggccgggcgtggtagctcactcctgtaatcctagcattttgggaggccgaggtgggaaaattacctgaggtcgggagttcacgaccagcctggccaacatggtgaaaccccgtctcacagtggcacgcgcctgtaattccagccattcgggaggctgaggcaggagaatcgcttgaacccgggaggcggaggttgcagtgagccgacatcacgtcaccgcactctagcctgggctacagagcgaggttttgtctcaaaaaaagaaacaaacaaacgaacaaacaaaaacgaacaaaaaaccccaaatataaccttttactccttcctcccccaacgcccccttgattcaccagacactccctacagggcaagttcattaaactcctcaagagttgacagttgatttagagaccaaagcatgcctgctgcagaactctcacccatcaggaggttgcctcaagaggtaacagccaaatctacgaaactccctccatcgggagactacctcgaaaaactcccacctggggagattttggcctagtcctgtccacaaaggtgccagcagcccctagctcaaccgcccagtagataaggcaccagagctaacatgcgccccccaccctactttttcccctgccttttaaagtgctggctttctgctccaaaacggaagcagtatgtttgaaggtgggacgcctgtgcttcttcccctaagctagttttggaataaatcactttctttagaccagacctagctctcgttaattggacttcgcaagctggcaagtgactaacccacattttggttacagtagctgcacttcatgcccaccttgtgttggatgaggtcatgtgactagctctaaccaatgagctgtgagtgaaattgacaggcattattcccaaactacagcatttaattgcctgtgtgagatcccccaaagctcttacttccttccagcgtgacagcaagcaatgtttcataatgttccagaatgtggctgttccatcggagactatgatgagcagaacctccttgcaacgacccaaaatggacatgaagcctgggtgaggaataaacgttgtagttttaaggttcttgggctagtttgtttctgcagcatgacctagcctatcctaaccattacaaattacacacccctttttacaggtgaagaaactgaggcatagacaggttaatcactgttcttggtcacccagctagtaagtgacaaagtgatagagtcaaggttagaatccggacagtctgactctaaagtctctgcttgcttgctttctttttctttctttccttctttctttctttctctttctttccttttctttctttttctttttttctctttctctgtttctctctctctctctttttctctctctctctctctttctctctttcttcctttcttggcggagtttcactcttgttgcccaggctggagtgtaatggcgcgatctcagctcaccgcaacctttgcctcccaggttcaagcgattctcctgcctcagcctccccagtagctgggattacaggcatgtgccaccacgcccagctcattttgtatttttagtagagatgggatttctccatgttggtcaggctggtctcaaactcccgaactcaggtgatcctcccacctcggcctcccaaagtgctgggattacaggcatgagccaccatgcctggctttttttttttttttttttttttttttgagacggagtctcactctgtcggccaggctggagtgcagtggcacgatcttggctcactgcgacctccgcctctcaggttcaagcaattctccagcctcagactcctgagtagctgggactacaggtgcacgaagctacgcctggcttttttttttttttttttttttttttttgtattttagtagagacggggtttcaccgtgttacccaggctggtcacgaactcttgagctcaggtaatctgcccgcctcggcctcccaaagtgctgggattacaggcgttagccaccgtgcccggccccggctttttttttttttttttttttttttgaggagtctcactctgtcacccaggctggagtgcagtggcacgatcttggctcactggagcctctgcctctcgggttcaaatgattctcttgcctcagcctcccaagtagctgggattacaggcggagatcatgcccggctaatttttgtatttttagtagatggggtttcaccatgttggccaggctggtctcaaactcctgatctcaggtgatctacatacctcagcctcacaaagtgctgggattacaggcatgagccactacacccaacctctttttctatttttagagacagagtcttgctctatcactcaggctggagtgcagtggtattatcacagctcactgcagcctcaaacctttttttttatttttagagacagagtcttgctctatcactgaggctggagtgcagtggtgtgatcatggctcactgcggcctcagacttccgggttcaagcaattcctctcacctcaccctctgaagtagctaggactacaggcatgcaccaccacccctggctttctttttttttttttttttttgtagaaactaagtctcactatgttgcccaggctggtctcaaactcctggcctcaagcgatcctccagcctcagcctcccaaagtgttaggattacaggcatgagccaccaggcctggtctgctgttgtttctaaactgttatcttcggtggcggggggggtccctaaacatatggaaaattcacaaactgcaacagattctggatgaggttggcctttgctgtcctgttgcctctgataatttttttttttttttgagatggtttctcgccctgtggcccaggctggagtgcagtggcgtgatctcagctcactgcaacctccatccacctcctgggttccagcaattctcctgcctcaggctcctgagtagctgggactataggcatgagccaccacgcctggctaatttttgtatttttagtagagatggggtttcttttttcttttctttttttctttttttgtgagacggagtctcgctctgtcacccaggctggagtgcagtggcacgatcttggctcactgcaagctccaactcccaggttcacgccattctcctgcctcagcctcctaagtagctgggactacaggcgtccgctaccacgcccagctaattttttttttctatttttagtagagacggggtttcaccgtgttagccaggatggtctcgacctcgtgatccgcctgcctcaggctcccaaagtgctgggattacaggtgtgagccaccatgcccggccaagacagggcttcaccatgttagccaggctggtctcgaattcctgacctcagttgatccacctgcctcagcctcccaaagtgctgggattacaggcatgagccatctcgccctgccacccctgatcatttttggcttcttgtttctttccctcttgagcactggctctcttggttggtttctctctagcatctcccctgggggagatctaggaggctggacaagaggattgagtaacatcctcctccctctaacacccacctggaccctttagttccttcagccttacacctccaatcccctctgatctccttgccaatcccctgctctgcctacactctgatcacatgagccctaacacttcctcctaagggctggagaacaattgtttgctacagggagaaaaatcctcaagccagagagctgagccattagactcctgggtcctgaggagagcccggagctgaggtttcagaaatgtcttctcacctcttcatcccttgggctgcctcctgtcacttcccggggtctctgagtcccctctgcactcagaagctcccagggaggaccagccagacagggctcaggacacttacaggcaaacctccactcctcccgccctgaccagttaacgcgacacttattctacattaaataccaattggaccaattttctgctgtaattaaaacctctgcagacgtgttccctgctcagcagtgatgagtttattaacctccagctctgaaggaatgtgggggcaggggagagggaaggaaagaagagagttttccagattaggagattggacccagggagagggtgggtttggagctgtgctgtctcctagctgggctctgagcaagagacagatgggggtgtgtgcgaaagcattaacatctgtgtgtttgctgcctctgcagtggggacttgcaaatatctacccccaccaccctgacctgctacagaaccaggactgccctcccataatcaagtgtgttttatagccctacttcccaaattattggcaggcagcatgtcctgaatctggaaatacagcctctttcagttcaacaatctggccttgtatgggatcgtttgttacgtagcataacttaggttatctgactattacatattgtatctccacttcatagctggtgaaacaggcacatgccaccatgcccagataattttctcctctgggcaggagacagatggaggcgtgtccaaaagcattgacaactattgtgtttgccgcttctgtggtggtgacttggaagtatctgaacccccatcaccctgacctcagtttcacaacagaggcccagtttgcatacaaacctaggtgaggtcatgaagggttcatagcttgcagccatagaggctggaaatcaatgcctagtacatccctggcagctcaaggagtcagctcatttctgttcattagagatcacagaatcatcacgttctctctctctttttttttgagatggagcctcgctttgtcacctaggctagagtgcagtggcgcaatctcggttcactgcaacctccgcctccaggattcaagcgattctcctgcctcagcctcccgagtagctgggactacaggaatgtgccactacgccccgctaatttgtttgtatttcagtagagacggggtttgaccattttggccaggctagtctcaaactcctgacctcaggtgatatgcccacctcggcctcccaaaatgctaggattacaggtgtgagccgccatgcttggctattctttttttttctgagatgagatttcactgtcctccaggctggaatgcagtggggcaatcatagctcactgcagcctcaaactcttgggctcaagccatcctcggcctccagagtagccgggaccacaggtgcacaccaccatgcctggctaatatttttttttttttactgcttgtagagatgggggtctcactatgttgcccaggctggtctcaaaactcctgggctcaagcaatcctcctgcctcagcctctcaaagtgctgggattacaggcgtgagccgcagcgccccgtcctgctcatttccttttattaccaacaattctccattctttatttttaatatccccttcattcaccagggctcaactttgtcatccaacttttattgctttgtggggaggaacgcaaccaaagagacactgggaggcaatgacctcatggaacaaggaagctgtgttggacatctggaatggagttggatttccaccatggcccaaaacacttccaattcctccttctagcatgtttcgaaccctgtggccaacactgccatttgtcacctttttgaatgtgttggattatctgttagcctatctacatcttgttttcctgtgtatttcaggggctggaattctggcaactactccttgtctaagattctgttgccaggagggttacagggtggattctataaatgaggagcatcagatcgtcgtggtggctcacacctgtaatcccagtactttgggaggccaaggcaggcggatcgcttgagctcaggagttcgagaccagcctgggcaacacggtgaaagcccatctctactaaaaatacaaaaaattagcagggtgtggtggcacatgcctgtaatcccagctactttggaggctgaggcgggaggatcacttgagcctgggaggcagaggttgcaagtgagctgagatcacaccattgcactccagcctgggtgacaagagtgacactccgtctcaaaaaaaaaaaaaaaaaaaaaagagagcgagaacatgtggcctgcaaagacagaaatatttagattctgatccttgatggaaaaagttttccatcctctgctcttgacttcatttggtcattcccacaatgaataagttagttctaggatcttggagcaaacatgtctgtattagtctgttttcacaccgctataaagaactatgtgagagtgagtaatttatgaagaaaaaaggtttaattgactcacagttccgcatggctgatggggcctcaggaaacttacaatcatgacaaaaagtgaagggaaagcaaggcacatcgtacatggaggcaggggagagagagagagagagagagagagagagagaggagagagagagagagagagagagagagagagagagagagagagagagagagagagagagaggaagtgccagacgcttatcaaacaaccagatctggtgagaactcattgtcacgagaatagcaagggggaaatgctcccgtgatccaatctcctcccaccaggtccctcccctcgacacgtggggattacaattctagatgcgatttgggtggagacacagtcaaacatgtcagtgttctttctctaaggctccattttgtcctctgtaaaatggggtgagaggcccctacttaactgcacgagcttgctctgcaattaaaattgcatgtcatgggccaagggactttgaaagtgggacagctcctgcaggtgcttttggctggagtcacaggatccaaaaccccccagtaatccccacatctttcctttcttttctctctcttttcttttttctctttctctttctttcttttctttctctctttctttttctctttcttccccctctctccttcccttcccttccctccctccctcccttccttttccttttttctgagaaagagtctcgctcttatcacccaggctggagtgcagtttcgtgatcttggctcactgcaacgtctgcctcctggattcaagctgttctcctgcctcagcctcctgagtagctgggattacaagcgcccaccaccacgctcagctaatttttgtactcttagtagagatagggttttgacatgttgaccaggctggtctcgaactcctaacctcaggtgatccgcccaccttggcctcccaaagtgctgggaatacaggtgtaagctactgcgcccagcccttttctttctttcttttttttttttttttgagacagagtctcactgtgttgcccaggctggagtgcagtagtgtgttctcagctcactgcaaccttcacctcccgggttcaagctattctcctgcctcagcctcctgagtagctgggataacaggtgcctgccaccaagcccggttaatttttgtacttttagtagagacagggtttcaccatgttagccaggctggtctgaaactccttactgtcaggactctgagcccaagctaagccatcataacccctgtgacctgcacgtatacatccagacggcctgaagcaactgaagaaccacaaaaaaagtgaaatagtcaattcctgccttaactggctaatggtggatgacattccaccattgtgatttgttcctgccccaccctaactgatcaattgactttgtgacattccttctcctggacaatgagtctcaggagctccccaccgagcaccttgtgacccccgcccctgcccacaagagaaaaccccgtttaactgtaattttccactacctacccaaatcctataaaactgccccacccctttgctgactccttttttggactcagtccgcctgcacccaggtgattaaaaagctttattgcttacagaaagcctgtttggtggtctcgtcatatggacgcatgtaatactgacctcaggtgatctggctgcctcaacctcccaaagtgctgggattacaggtgtgagccactgtgtctggcccttttctttctttttagtggaaatggggtcttgccatgttggtcaggctggtctcgaactcctggcctcaagcaatcctccctcctcagcctcccaaagtgctgggattataagcatgagccactgcacccagctacctttctcagttctgccttaatgtctcacgtggctgttttccttttctcttgtgtattctttcctccccctctgtcttcttgctttttttttttttttttttttgagagagagtctcattctgtcactcagactggagtgcagtggtgtgatcttggctcattgcaacctctgcctcccatgttcaaacgattctcccacctcagcctcccaagtagttgggactacaggcgcacgcaatcatacccagctaatttttgtatttttagtagagacagggtttcaccatgttggtcaggctggtcttgaactcctgacctcaagtgatccgcccacctcagcctcccaaagtgctgggattacaggcgtgagccaccgctcccagcctctacttgctttttccttctcacacctctctcttctcttctggttccctctcccagccttctctctgcacctcctcccctgccacttgctctcttcaaactcggggatgtgagaaagttcccgcagaaattgcaatctcctctcctctcatgtggctccgagataagacagtaaaaatccgattttcagcaatttgcttcatttgtgagctctccggagtctccctttctccccctgacataagcttagcaaaattgcctgggtggagtggatatttttaaccacttagtagtcagagcgggttcagaaagttttgcaagaaaccgggccaggccctgtgcctggggttgctggcgggtttggggctggagggaagcacgtggggtggcctcaaagggtttagtggaggggcatttaagaagaggatgtccgccggccatggtggctcaagcctgtaatcccagtgagaggtgacagtgtgctggcagccctcgcagccctcgctcgctctcggcgcctcctgggcctcaggcgcccactctagccgcgcttgaggggcccttcagcctgcggctgcaatgtgggaacccctctctgggttggctgaggccggagccagctccctcagcttgtggggaggtgcggactggtggaaaccagggctgcccgctgcacttgcaggccagcgtgagttccaggtgggtgtgggctccgtggccccgcactcggagcagcaggctggcgctgccggccctgggcagtgaggggcttggcacccgggccagcagctgcggagggttcgccgggtcccggcgctgtgctcgaattctcgctgggcctcagctacctccccgccgggcagggctcgggatctgcagcctgccatgcttgagccttcccccaacgccatggcctcttgtgcggcctgagcctcccctaccagcgccgccccctgctccgcggcgccgggtcccaccgaccacccaagagctgagaagtgcgggcgcacagcgcgggactggcaggcagctccacctgctgccctggtgcgggatccactatgtgaagccagctggactcctgagtccagtgggacttggagaacctttatgtctagctaagggattgtaaatataccaatcagcactctgtctagctcaaggcttgtaaatgcaccaattagcactctgtgtctagctcaagatttgtaaatacaccaatcagcactctgtgtctagctcaaggtttgcactctgtatctagctaatatggtggggacttggagaacctttagtgtctagctaagggattgtaaatacaccaatcagcactctctgtctagctcaaggtttgtaaatgcaccaatcagtgctctgtgtctggctaatctagtggggacttggagaacttttgtgcctagctcagggattgtaaacgcactaattggcaccctgtcaaaatggaccaatcagctctctgtaaaacggaccaatcagcaggatgtgggtggggccagataagggaataaaagcaggctgcccgagctagcagtgccaacctgctcccattcccgtccatggtgtggaagttttgttcttttgctctttgcaataaatcttactgctgcacactctttgggtctgcattgcgtttatgagctgtgacactcaccgcgaaggtctacagcttcactcctgaggccagtgagaccaggaacccaccgggaggaatgaacaactacagacgtgctgccttaagagctgcaacactcgccgtgaaggtctgcagcttcactgccgaagccagcgggaccaccagcccgccagaaagaagaaattccaaacacatccgaacatcagaaggaacaaactcccgacacaccacctttaagaactgtaatactgcaagggtctgcggcttcgttcttgaagtcagtgagaccaagaacccactgattctggacacaccagtactttgggaggccaaggcgggtggatcatgtgaggtcctgttcaagactagcctggccaacaggatgaaacaccgtctctactaaaaatacagaaaattagccaggcatggtagcacatgccttgtctatagtcccagccgctcaggagactgaggcaggagaattgcttgaacccgggaggtggaggttgcagtgagctgagatcgcgccactgcactccagcctgggtgatggagtgagactctgtctcaaaaaaaaagaaaaaaaatggatgtgactgaagaaagaaaagaggttccctttggaagaagcagatctgctcttgagggggtgaagctgcaggggaacgcccaggctttttccctcccaccagtacctccttttggctgaatccaaccccaaagcagagggcaatggagcccagtggtgtgggcctagaggtcagctctcaggacatagaacaggatggttggccggacgcagtggctcatgcctgtaatctcagcactgtgggaggcagagataggagaattgcttgaacctgggaggcggaggttgcagtgagctgagatcactccactgcactccagcctgggagacagagcaagactctgtctcaaaaaaaagaaaaaaaaaaaacaccaaaaaacaggattggactgcagattgatggaacctggggtaggtaacaggaatagagaatgacctgcatagaagccacatgtcctaacttcctaatacaccttagggatacccctgagaagccagtctggagaccaaaggcatctccttcccaaaaccaaaatggggggtgggaataatgaacatttagtgagcacctaccatgtaccaggcatatgctaagtgctttatgtgtacgacgtcattgaatccccacagaagtcaatgaaggaagcctttttctttgttggctgctgggacaaaaatcaaaatcacagtggctcaaggaattaatatagaatcagggtctcgctctcttgcccaggctagcgtgtaggggcacaatcatggctcactacagttttgacctccctaggctcaagcgatcctcccacctcagcctcccaagcaggtggaactataggcatgtgccaccacgcctggcaaattctaaagttttttgtagaggtggggtcttgttgtgttgtccaggctggtctccttggcctcccaaagtgctgggattgcaggtgtgagccaacatgcctggtccaatttagattttgttttttaagatggagtcttgctctgttgcccaggctggaatgtagtggcaccatctcggctcactgcaacctctatctcctgggttcaagcaattatccctgcctcagcctcccaagtagctgggattacaggcgcccgccaccatgcccagctaatttttgtatttttagtagagatggagtttcgccacattggccaggctggtctcgaactcctgatctcagatgatccacccacctcagcctctcaaagtgctgggattacaggcatgagccactgcccccggccccagtttagattttaaagaaattactaaggctgctaaaccttatgttgctctcagccccaagggcactgagagttgggttttcccgatcccaggcttcctgggtatagctcagaccacccttaaattttccacccatgctccctcatccattctttcttcccttctacaaattttcctcttctctgttggccaggaacatttacgcaataatgtcacaccagtgactaccagagttgaatgccgatagagtaacgggatgctaagatggacatttcaaccagggagacacaacgactagcaacagaagccagaccacagtgaagatctcttttcttttctttctttcttctctttctttctctctttctctttctctctccccctccctccctttctctctttctttcctttctttcttttcttttctattttttttttttttgagacggagtctcgctctgttgcccaggctggagtgcagtggcgcgatctcggctcactgcaagcttggctcactgcaagctccgccttccgggttcacgccattctcctgcctcagcctcctgaggaactgggactactggcgcctgccaccacgcccggctaatttttttgtatttttagtagagacggggtttcaccgtgttagccaggatggtctcgatctcctgacctcgtgatccgctcgcctcggcctcccaaagtgctgggattacaggcgtgagccactgcacccagcccttccttccttccttccttccttccttccttcctttccttcattcctttccttcattccttccttctttccttccttcctttctctttctttctccttccctccctctctccttccttccttttctttctcttttttttttttttgagacagagtcttgctctgtcactaggtaatcttggcttactgcaacctctgcctcccaggttcacgccattctcctgcctcagactcctgagtagctgggactacaggtgcacaccaccacacccagctaatttttgtattattagtagagacgaggtgtcaccatgttggccaggctggtctcaaactcctgaccttatgatccgcctgccttggcctcccaaattgctgggattacaggcgtgagccaccatgcccagcctttttcttttttttttgacagagtcttgctctgttgcccaggctggagtgcaatggcacaatcttggctcactgcaacttccccctcctggattcaagcgattctcctgcttcaggctctcaagtagctgggattacaggtacgtgccaccacgcctggctaatttcatatttttagtagagttgggatttcaccatgttggtcaggctggtcacaaactcctgacctcaagtgatccacccgccttggcctcccaaagtgctgggattacaggtgtgagctaccacatctgatccctaatttttaattgacaagtaattgcatatgtttatggagtatgatgtgatgtttcaatactgtatatattataaagcagatcgcgctaatgaacatatccatcaccttacatacttatttctttgtagcgagaacagtttgtttttttagagacagggtgtgtaaaatattgcccaggctggttttgaacacctgggctaaagtgatcctcccatctcagcctcccaaaatgctgggattacacatgtgagctaccgcaccagaccctatagtgagaccatttaaaatccactcatttcacaagtttgaaaatacattatggggtggggcacagtcactcacgcctgtaatcccagcactttgggaggccgaggcaggtggatcacgaggtcacgagttcaagaccagcctggccaagatggtgaaaccctgtctctactaaaaatataaaaattagccaggcgtagtggcgggcgcctgtagtcccagctcctcaggaggctgaggcagagaattgcttgaacccgggaggtggaggttgcagtgagccgagattgtgccactgcactccagcctgggtaacagaacgagactctgtctcaaaaaaaaaaaaaaaaagaaaaagaaaaaatatacattatgattagctatagccaccttgctgtgcaatagatcaccaggacttactcttcctaatggaaactttgtatcctttgggcaacatgttttccgcgaccccagactctggtaaggactgttctactctctacttcggtgaatgtgacttttttttttttagattctgcatacaagtgagatcatgaactatttgtctttctgcgccaggcttagtttacttcgcataatgtcctccagattcatgcacgttgttgcaaatgacaagatttccttcttttatcaggctgaacagtactccattgtgtatatgcaccacattttctttatccattcattcattgatggacacttaggttgcttccatatcttgttattgtgaatagtgctgcaaagaacttgggagtgcagatagctcttccgaatactgatttcctttgcacattactcggaagataaatttttttgagacagagtctcactctgtcgcccaggctggggtgcaatggcccgatctcggctcactgcaagctctgtctcccgggttcacgccattctcctgcctcagcctctggagtagctgggactacaggcgctcgccaccacgcccagctaatttttttttttttttttgtatttttagtagaaacggggttttaccatgttagccaggatggtctcaatctcctgacctcgtgatccacccgcctcggcctcccagagtgctgggattacaggtgtgagccactgcactcggcctaatttttgtatttttagtagagacagggtttcactatattggtcaggctggtctcgaactcctgacctcgtgatccgcccgcctcggcctcccaaagtgctgggattacaggtgtgagccactgcacccagctgttttgttttttgttttttgtttttttttcagacagggtctcagtctgctgcccaggctggagtgcagtggcacaatctcagctcactgcaacttctacatcctgggttcaagtgattctcccacctcagcctccgagtagctgggactacaggtggacaccaccacgcccggctaatttttgtattttttatatttttttagtagggacaaggtttcactggcgaggctggtcttgaactcctgacctgaagtgatccacctgccttggcctgagacaggagaatcgctggaacttgggaggcagaagttgcagtgagccaagattgccccactacactccagcctaggtgacagagtgagaccttgtctcaaaaaaaaaaagtgaaagtgaaagatttcattctgaacaccactaggtcctgaaaggcaaggttggctgacagcagacccagtgcaatgagaaccatctgacccctggatttgtttccttcctgtggccgctataacagtaccacaaactgagtcacttaaaacaacagaaacctattttctcacagttctgcaggccagaagtctgaaatcaaaacatctgcagggccacgctccccacagaggctctagggaggaatccctcctggccccttccagcttgtgagggctccaggcattcctcggtggcgaccacagcattccaacctctgcttccgtcttcacgggtccttctctactgtgtctcctctctgtgtctctcctaaggagagtcgtctgtggatttaggactaccatgttttccaggatgatctcatcttcagaattctaatatctgcaatgaccctttcaaaacccctcctacagagttgacaaggattgcatgccagattccagacagaaatacagttacaatgaaccatgaatcaggctgcactagggtccccttccttgctgctaaaggtcaggtagtacttttacaccccattgtttcaccaggcgcagtggatcgcgcctgtaatcccagcactttgggaggccaaggcgggtggatcacctgaggttgggagttcgagaccagcctgaccaacatggagaaaccctatctctaccaaagatacaaaaattagccaggcatggtggtgcatgcctgtaaacccagctactggggaggctgaggcaggagaattgcttgatcccgggaggcagaggttccagtgagctgagatcgtgccactgcgctccagcctgggcatcaagagcgaaactctgtctcaaaacaaaacaaaacacaaatacatcccattgtttctacagacaggatctctgacattaggagcatatggcttttttttttttttttttttgagatggagtcttgctctgtcacccaggctggagtgcactgacgtgatctcagctcactgtaaccgctgccttccgggttccagcgattctcctgcctcagcctccagagtagccgggattacaggcgtgcaccaccacacctggctaatttttgcatgtttagtaaagaaggggttttaccatgttggccaggctggtcttgaactcctgacctcaagtgatccaccgcctcggcctccaagtgctgggattacaggcgtgagccactgcgcccagtcaggatcatatggcttttgcttaaggatcgcttcagatgtttttgcagatcctgaattccagcaaccagtctgaagaagaccccccatataggaatgggatcagcatgagaatacagcttcttcacccaccccttgtccctcaactcctgcccaatcctctgtcccaagacttcatcttgcactctttgaccaatcaaaggatctccacacttgggcccactccataccccttaaaaaccccagccccaaattcctaggggagatgaattttttttttattttatttcatttttatttattaattttagtttgtttgttttctgagagaatctcactctgtcacccaggctggagtgcagaggtgcgatcttggctcactacaaccttcatctcccaggttcaactgattctcccacctcagcctcccaagtagctgggactacaggcacgcaccaccacacccggctaatttttgtatttttagtagagacagggttttgccatgttggccaggctggtctcaaactcctggcctcaagtgctctgcccacctcagcctcccaaagtgctgggattataggtgtgagccaccacacccacccaggagatggattttagatttgctcccatctcgtcgatctgtggccctatgattaaacctccttctctgctgcaaactggtatctcagcatgttgacttgcccagtgcctcaaacaatgggcctatgacagttacagtttatccacctaagatcacattcaggccaggcgcagtggctcgtgcctgtaatcccagcactttgggagtccgaggtgggaggattgctcaaggccaggaccttgagaccagcccgggaaacatagcaagaatctctctctgcaaaaaaatacaaaaattagccaggcacggtgttgcgtgcctgtggtcccagctacttggaaggctgaggtgggaagatcacttgagcctgggaagtcgaggctgcagtgagccaaaatcatgccattgctctctggccaccctgagtgacagagcaagaccatgtctttaaaaaaaaaataagttggccaggcgtggtggctcatgcctgtaatcccagcactttgggaggccgaggcaggcagatcatctgagatcaggagtttgagaccagcctggccaacatggggaaagcccgtctctcctaaaaatacaaaaattaggcggacgtggtggcaggcgcctgtaatcccagctactcaggaggctgaggcaggagaatcgcttgaacccgggaggcggaagttgcagcgagccttgattgcgccactgcactccagttgggagacaagagcaagacttcatctcaaaaaaaaaaaaataataataatataaaaacatcacattcacaggttgcaggggccagagtgtggacacatccttttggggggccaccatttgacacactatattccctcctggagctgcagccctggccgtgaaaggaaaggagaggaaagcaagaaggaaggggccctagcaccacccagacccccagaacatgacgctggtggggatggaggagaggtagaaggaaataggattgaagtctaaatcaaggccccagcttgggtctggacattccttgttttgaattgaagccaagctgccctgtgactaaggcgactccaggaacatctgttatctgagatgaacagagaacaaagtcataaggctaagattttatcaaggggattgcggggcaggggggacacatttccctgtgaaaagcatgttatagagatcatgacagatcagcccttgaccggaattcacacaatgctggttcatttcatcacagggaccacctgacccccaggattgttctagaaggtctttttctctaccatctccacaccaatccctctccacctgccgctcccaccttccactgggtccccatcctcctctgggctggggccctgcctgcctgccatccattcactcaacaaacacttattattattattttttgagacacagtctcgctctgtcgcccatgctggagtgcagtggcacgatcactgctcactgcagcctctgcctcccaggtttaagcaattctcatttctcagcctctcgaatagttgggattacaggcatgcatcaccacacctggataatttttgtatttttagtaaagacggggttttgccatgttggccaggctggtcttgaactcctgggctcaaatctgtccgcttggcctctcaaagtgctggtagttacaggtgtgagccactgcgcccagccctaacacttattgagcacctgctgtatgccaagggccagggaagggggcggcatacagagccaggagggaacagtgtggaggaacttcccttttggagctgactttccagtgggagacctgggcgatgacaagatgaacaaggaatgaatattctgtgttgtagccaaaagcagccagtgcaatggagaaaatacagcagcctcaggcctgtaatcccagcactttggtaggccgaggcgggcggatcacttgaggctaggagttcaaaaccagcctggtcagcatggcaaaaccctgtctctactaaaaatacaaaaattagccaggtgtcatggagcatgcctgtaatcccagctactcggtaggctgaggcaggagaatcacttgcactcggaggtggaggttgcagtgagctgagagcacgccattgcactccagcctgagcaacagcgcgagaccccgtctcaaaaaaaaaaaaaaaaaaaaagcaataagagtctgtggatgttgtaaattgggtgtgtgtgcatcagagaaggcttccctggggaggggcacaagtgaagggagacctggaggaggtgagggaggagccatgtggatatctggggaggatgactcaggcagagggaacagcctgtgcaaaggccctgaggcaggatgtctttggtgagtttggagaacagtaaggaggcccatctgcttggagaaagctgggttttctggcctccgtgaggactggagttttgctctgagtgaggcagttggtaaggagaataatgccctccttcccaaggtatctacttcctcatcctaaactttcaagatctcatggcctggggaggataggagaaaggggctggtaactgctccagcgggttgataaacatgggtacttcagggaggcttcctggaggagtgtcaagcatatgactggcttgaattgcgggagaggcaggctgagcagggagcaggtgcccagggagaggcagaagacaggtcagacacttaaaagtgtctaaaggagaaagactcctttggacacagccaggccctgagaagcagggttagtgaattgctacctcatgcaacaaaagggactttgctgattaggtaattaaggatcttcagacagggaaatgaccttggatcatctaatcacacaagtccttaaaatgcaagggggcggcagaggggagttgaaggctgtcatatgagaaggacttgactcgtcattgctggctttgaaaatggagggagggcccacgagccaaggaatgcaggcaacttctagaaacggggaatggacaaccagcaagaaaacagggcctcagttctacaaccccagggaactgaatcttgcacccctaaatgagcaaaaaatagatcatcccctaaaacctccaagaaaggactgcagcctgctgacatcttggtcttaggcaggtgagaccctgaaccacatctctgacctctagagctgtaggataatttgcgtcgttaaataaatgctagctagtgacggcaaccatgggaaattaacacaaggtgggagctttcccggttctgagcgggaggagggggcgtggcctgatcaggtgttcgctcgcgccctctggaggctgcggagggaacaggcttcagggccaggctggagacctgagcaagggtagagggaactgcacagtccaggtgagggatgctgggctggaccaggtgagggatgctgggctggaccaagtgagggccggggaggtggggaagaaatgaagtccgaggtttgaacgtggatggaaagagaaaaaaagagaggactccagcggggcacggtggctcacgcctgtaatcccagcactttgggaggccaaggtgggagaatcacttgaggtcaggagttcgagaccagcctggccaacacagtgaaacaccgtctgtaccaaaaatacaaaaaatagccaggtgtggtgctgcacgcctgtagtcccagctactcaggaggctgagacagcagacttgctcgaacccgggaggcggaggttgcagtgagcctagactatgccattgcactccagcctggaagacagagtaagactccatctaaaaaaaaaaaaaaaagagagagaggactcgagtcaaggatgaccagaagcctctgagctgggaacttggagtctcctgttccctccaccccaactccactagtccctacctccccttggcctcacctgccagcagttgtcccaggcggaggccacatgcttccctctcctctgaggccttgcccctgcctgtgacctctcacttgtcatatctgctgtctctgttctcaagacaggaagtcagatgggagttgaagacggctgggacctgtgagtccccaggcccccagagggattccggatttgagagtcggcctcctccctcccatccaagcccagccctgccaaatcagctcccagctcactccctggtctgcacctctttctctgtctctttctctctctggaattttcattctctttttggtaaccgaattatcccatctccacctctcactgggggccgcccgcagaggcgtgggcgaggaggggcccgggtcgcagcgcgagatattaaaccatcaatcacccgccaacgccgactcccccgcaccaggaccctccattggctccacctggaagcagaccagctccagtgcaggcctggaggcctggggaccccatcaaaatgggaggccttggaagaatctcacaggccctgcatctacctgggcaggtgcctgggtgcagatcggcctggctcaatgcacagacaaggtgtcctgggttcaaatccacaagctacttcttatccacacgtgggagccactgcattgttctgtgtcttggtttcaccacctgtaaaatggtgataacagccgggcatggtggctcatgcctgtaatcccagcactttgggaggctgcggcaggcagatcacctgaggtcaggacttcgagaccagcctggccaacatggcaaatatataaaaatctctactaaaaatataaaaattagccaggtgtggtggtgtgcccctgtaatcccagctacttgggaggctgaagcagtagaatcacttgaacccaggagtcagaggttgcagtgagccgagattgcactactgcactccagcctgggggacagagcgagactccgtatttaaaaaaaaaaaatggtggtaacattttctacatcattggggttcactgtcaggattaaaccagttaaggcagatggcaatatctggctgatagtaagtcctgtctaggatttgctgctagaatgattttccttcaagattgggggggggtcattcacttgtgaaagaaatccaagattctggcttttgaggggacttaatggggttcatacttgtgtcacctcacagctgctgccttgtataggttggaattggattttttttttttttgagatggagtctcgctctgtcacccaggctagagtgcagtgcacaatcttggctcactgcaacctccgcctcccaggttcaaggaattctcctgcctcagcctcccgagtagctgggactacaggcacgtgccaccatgcccagctaattttttttttatttttagtagagacggggtttcaccatcttggccaggctggtcttgaactcctgaccttgtgatccacctgcctcggcctcccaaagtgctgagattacaggcgtgagccaccgcgcccggccagaattggatttttttgttttttgtttttgagacaaagtcttgctctgtcacccagggtgaagtgccgtgtggtatgatcatggctcactgcagcctcaaccttctggatttaagcgatccttccacctcagcctcttgagtagttaggattacagacatgagccgccccacccaggtctaggggaaaaaaaattaaaggctctttcagaaccttaactagggccaagcaacgcatatttcaaggcactcaattcacaaaacaaggtctcagtgctttgcacaggctgttccccctgcctaaaatgctgttccctcagccagccacgtgactcctccttgcctgcttctgggtttgcggcaatgtcccctcctcagtgaggtgactttgcaaaaattgcacccagggcccctgcccgcccccacccctcccagctgtatttccctccatagcatgcatcccattttgcataccgtatgcagtgcttgtggggtttgtctgttcatcccactggagtgttaaacccagggcaaggttcattcattcactgcccagcacggcacctggcatgaaataaacacccagtaaatacttgttgagtgaatgcatgaacaaattccattcagctgctcccagaggaccccacaggctgcagccagctcaaagctgctctggctgggccggtcagcaatcttgggtttcctggaggtgggtggagggggtatcactggatgtgttcagagatgcagctggttcactatcaactttgtgtggacttttccctttttctttgaggctggatctcactctgtcacacaggctggtgtgcagtggcgtgatcacagctcactgcagcctccactccagcgatcctcccacctcagcctcctgagtagctgggaccacagttgtgcgccaccatgcctgggtaatttttgtatttttcatagagacagggattcaccatgttgcccaagctggtcttgaactgagctcaagcaatctgcctgcctgggcctctcaaagcattgggattacaggcgtgagccacaacgcccagccaggtgtttattttctcattatttatttattgtagagatgggggcctccctatgctgcttaggctggtcttcaggtcctgggtgatccttctgtcttggcctcccaaagtgctgggattacaggcatgagccatggcgcccggccttgtgtagatctttaaaaggtaccccttccatgctgggtgccgtggctcatgcctgtaatcccaatactttgaaaggctgaggtgggcagctcacctgaggtcaggagttcgagaccagcctggccaacatggtgaaacctcgtctctattaaaaatacaaaaattagctgggcgtggtggcgggcacctgtaatctcagctactcgggaggctgaggcaggagaattgctggaacctgggaggcagaggttgcagtgagccaagatcgcaccattgcactccagcccaggcaataacagtgagactccatctcaaaaaataaaataaaataaaataaaataaaataaaataaaataaaataaaataaaataaaataaaataaataaaaggtacctcttcctctgggcagatgcaatgtgtggtgaggggaacagacgacgtcagcttctgctctagcttctgtctggtatgcttgtgcagtgtgcaacttgcacaactgttcttggcagtactgctcctgtcccccatctcttgagtagctcagaaggtgaggggcgctgtgaagaccaagtaaccagaggctggacctctacacccaggtgtttagagggccaaaccccaacctctgtgcccagctcattgctggtgaaaaatctgccaaggaactggactgttctgggtgacaccccaaagactcccctcctggtatccccagcagtgtctcccttgctcctccagactaggggtgccctcgccttccccagccccctctgcacgtttccacccagccaggagtcccacacttgcctgcttctcccaaccttctctctctctctctccagcacagtggctatttttatttttccttcttattaaatttccaacttctgcaaacaccatggcccctgcctcgccgcgccccccccccttcccttagggcggatttgattcacttgcgttttattaacagattaaaaaaaaaaaacctgcagctgccaccacaatgtgactttctccgctttcctggaggtttagggaaccgaggagaactgggctacaggatctctctctgggtttaaattcgccctcctccccactcccagggacctttccatcatagcctgagcggcgaggtcgggaaggggctgcggaatgaggttggatgtcgttctgggtttaggggggaatgggatgggtgtcaggcctgatgcggttcccccagccagggcctcgtcccaaggcggaactggaaattaaaaaaaaaaaaaaaaaaaaaaggcaatccgttgggaagccccgcccccgcccccgcctcccccccccacagaccctgggtgctaaactcttcgggtgggaggggcagcctcgggggtgtgggcttagagttggcgcctcccacacagagctggggtcgcccctaccctctctcccttaggatggctggcagggggccttgggaaggtttgccgcctgcccaagcccggctcgctcagttttctttcctccttaggacattctgattccggtgctgactcccagacctgagagcaaattgctccttcatgccccggggtgttttcctccccccaagtctttttttttgtcagtcgccctggcaaccaggaacccagctgcactttacttccctgggatacagaatgggggtagggggtgatggggaaactaactgggtcgtttaggccaggaccttcctaccctcctctttgccccctcttagtcctccacccctccccacaccacctggtccagccttgattgacaagagggcaggttgcccctgtcagggttacccatctgggtggttgggccacagcttccttctgggtcactctgttctgggaaggtccttcatttggcccgagggctaaggttccagctgtcagtgaaatccctttccccttcctttcctccactctttagtccctcaatcagggtgggctggtacggttgggcaggttggacactgcacaaggggacactgagtgtgttcaaactaagctcccgatttccattgctcccttactccatagcacactacagactaacctctcctctgccttactgacaccaactctctgctatcaggagagccaatgatttcaataaaatacttcagtcctggtcacaccccaatgcagagctgaagaaaggaagtccagtcgggaatttggggtcttgaacaacccaagccacagctcctgtgggagcttagagagagagcaaacctgggcagaaagaacttctacagagggccgggcgcggtggctcatgcctgtaatccagcactttgggaggcagagacgggcggatcacgaggtcaggagatcgagaccatcctggctaacacagtgaaaccccgtctctactaaaaatacaaaaacttagccgggcgtggtggtgggcgcctgtagttccaggtgttcgggagacggaggcaggagaatggcgtgaacccgggaggaggagcttgcagtgagctgagatcgcgccactgcactccagcctgggtgacagagcgagactccatctcaaaaaaaaagaacttctacaggggccaaagctagggtcgaggaccatagaatgccctggggtacccagggaggggcagggaatgattatcaaaagccccaaagaaatcatggggctggtcaagtttgcttcacggacccaattctacagcccaccatctatactctttgcctaggtagctcctcccactgggaggtggagcctatttccacaccccttgaatctgggttggtctcgtgatctcctttggccaatcaatggattgcagcagaagtgaagtcacttcccaatctaggcctgaagaagtggtgcatgtttctgctcgatgtctggaaaccctgcccctgtcaggtgaccaagccctagctagcctgctggaggatgagggaagaatcctgttgtcctagaccagcctacagccagccgggccccaaatatacgaaaagacccagcctgaataaatacagtgtgcctcttggacccatagacgttggtgggtgagcccagccaggggcggaaaaactgctctgtagcctgcgaagccaaaattaatgctgattgtcctaaactgctggatttgagcgttgttaggcagctttttttttttttttttgactcagtctcactttgtggcccaggctggaatgtagtggtgcaatcttggctcactgcaacctctgcctcccggattcaagcgattctcctgcctcggcctcccgagtagctgggattacagacacccgccaccacgactaatttttgtatttttagtagagatgaggttttgccatgttggccaggttggtctcaaactcgtggcctcaagtgatccagctgcctggcctctcaaagtgctgggattacaggcatgaggcactgtgcctggccttgtgttagacagcttaactggcaacaggtaactgacaaggagcctggcaggcacaggtgtgcattggtcagcacgtccccttgcccacgaaggagctagactcaaatcccgaggtccccaaaattgattgtcaactctttaacttcctgaggaatccttccccatttttcctttatttgtttcttttttgtttgttttttggcatggccttccagtgaaattccccatttttcctttttctttcttttcttttttttttttttttggacggagtctcgctttgttgcccaggctggattgcagtggcgcgatctcggctcactgcagcctctgcctcccaggctcaagcgtttctcctgcctcagcctcccgaatagctgggattacatgtaccaccatgccccactaatttttgtatgtttaatagagacggtgttccaccgtgttggccaggctggtctctaactcctgacctcaggtgatctgcccgccttggcctcccaaagtgctgggattacaagcgtgagccaccgtgcccagccccccatgttttctttccttggtatctctctgattgcacctcctctcctctctctttcacttccgtccagccacatcagcctcctagctgatctcctctatgctagttcccaccccagagtcttggcacccgctgttcctcctgtctggaaccttcttcccccagatctctatgtgtatcctccgcttttactccttcaggtctctgttcatgtgcgtgatcctctgaggtgcccgccttaacttagatagatacacgtctccttccaggccctcaccaatctactactgctcccaatgggagccacatcatgtccagcctaggacgctaaagttgacccagggctcagatgggagcagaacagccctcccctaaaacattcctttttttttttcttttttcttttttctttttctttttttttttgagacagagtcttgttctgtcacccaggctggagtgcagtggcgcgatcttgactcgctgcaacccctgcctcccaggttccagcaattctcctgcctcggcctctcgagtagttggaattacaggcacctgccaccacagcaggctaatttttgtatttttagtagagatggggtttcaccatgttggccaggctagtctcgaactcttgacctcgggtgatccgcctgcctgagcctcccaaagtgctggaattacaggtgtgagccactgtgcccggccacacaaaaccattcctcatccacctttcccctaatgattttactatccatggctaatcatgtcctagatccatgatttctttctttctttcctttttttttttttttttaagagacggggttggggggggtctcattatgtttcccaggctgatctcgaactgctggcctgaagcgatcctcccaccttgccctcccaaagttctgggattacaggcgtgagccacggtgcccggcctagagccatgatttcattacaagttgcaaaatactgcattcccagtttatcatggcattttcccatttatacatctgtcgtctccaacaatctggaaagccctcaacagcagagtcagagccacagggtaccaaggaaacatttgctgaaagaatttgaattcaggagatggagcctattgggggaaaaaacccaaacaaacaggtatttgttgtttagggcaaagaaacatggcaccatttctcctgcttctaggatcaaaggctgttccactccaatctccgctggatgccaagcctggccaaaagtcccaggacatggcctggccccctacccgtcaacgctttccctcttgtgacaccccatggagtcaccctatggactcaggaccaatggggttttggggagaagacagatcgtctgtctacaggtatcaacattgctttccttctcaaaaatttttttattttaaacctccccacaattcaaatgtttctcttattatcttctgccgagggaaaaaaattaataacatggcacaatataaaatactaaattaaaggcattttggaaccagcaattatttcataagcttctcttttattgccacgctaatgtgcctaattgctatcttaatgaggacattaatttctggctaatgtgatgttattatagaaattgcagtcaatctcttaaaaggaggaaagtgccagaaagccgtcccacgaggcagaggctttggtcaccccggggctgaggggcaaaggggaggggaggagacggtgctggaacccgggccaagactgggggaaggatgcggctgctgggagccagagagggggaaggcaggggacttgtgctgggactaaaacctcccagggaggccctgatctgaaagccagctgttgccgtgcccggggatctaggagatgaaactgaataggggaaagtgttacagcaataataaaacctgacatcagtggcaggcacggttgaggcattttctatgctaatccttgcaatagctctataaaatagatagtgtcatttcccccattttatagacgggggaacagagaggttgagtaatttacccaaggtcacacagctattacatgatagagatgggatttgaacccagcccgtctggcttaactgctgagctatgctgcctttcagccagcaccctgaaaccatcgataataatttcaaacatttattgagggcttactatgcaccggctgtgagtcaagccttttgcacacagcatctctgggtgggctccatcttggagaaagaggtgcagctacagccacatctgagcactccttaatatacagggaggacgaggcaaggctcaaagctcgggggctggtgttgcacctccctccccacacaggaacaggaaatccattgtaggtagagagacttcagggcccagagaggagaaggttattccctctgagttgcaccttatcacaggttactgtggtggtcagggtaggttttgaaggcaaatggtctgggttagaattctagcttttcccatttggcgagtggccgaccctctctgcacctcaatttcctcatttaaagattggggctatgggaggccgaggtgggcagatcatttgaggtcaggaattcgaaatcaacctggccaacgtggtgaaaccctgtctctactaaaaatacaaaaaagaaaatgagccaatcatggtggcctgtgcctgttatcccagttactcaggaggcagaggcaggagaatcacttgaacccaggaggcgaaggttgcagtgagctgggatcgtgccactgcactccagcctgggcaacagagtgagactccatctaaataaataaataagactggggctaacaatggaacctacctccaagggctgttataagaattgagcaactggttgggcgtggtggctcgcacctataatcccagcactttgggaggctgagatgggaggattgcttgagcccaggagtttgagactggcctgggcaatatagcaagactccatctctacagaaaaaaatattaaaaattagccgggcatggtagcatgcacctgcagtcccagctacttgggaggctgagatgggaggatcgcctaagtccagaagtttgagaccagcctgggcaacatagcaagaccccatctctacataaacgtataacaagctgagcatggtggcgcccccatgtctgtagtcccagctactccagaggctaaggcgagaggatctgcactgcagcctgggggacagagcaagactccgtccctaaaaaatccaaaaacaaaataaaagacaaactgtgtattagaacaaggacacgccagctgctgtaacgagcaacctgtagatcccagtggcttaatgcactaaaggctactttctcactcacatcacgctgccgcacctgggaaccagacgccggctatattgtggcttcaccttcttccagtgactcagaggccccacaagaccctctttgtccagccagcagatgcaaaggaagaattagaaggtgcaggtgggaggtgttaaaagcctgaatgtagcacacctcacttccattcgcatcccacagaagcagataatgataaaggttaggaaataggtttggagtctgggaaacatggggagaccccatatttacaaagaagaaaacttttttaaaattatatggttaatggtggcgcaagcctgttgtcccagctactcaggaggccaaggtaggagtgaggtaggaggctggaagggactctggaggtgaagttcagacactggaccaaattgatggccagatgcggtggttcacacttgtaatcccagcactttgggaggccaaggtgggtggatcacctgaggtcaggagttcgagaccagcctggccaacatggtgaaaccccgtctctactaataatacaaagattagccgggtgtggtggcaggcgcctctaatcccagctactcgagaggctgaggcaggagaatcgcttgaacctgggaagcagaggttgcagtgagccgagatcatgccactgtactccagcctgggagacaagagtaaaactccgtctccaaaaacaaacaaagaactagctaaagcaggtgtgtgtaggtgtgtgtgtgtgtgtgtgtgtgtgtgtgtgtagcacctccccataagacacgcccaccagtgtgccatgtcggtttacgattaccatggcaacacctggaattccccgcccctttccatggcaactacccaaccacctggaagttaccactctcatcctagaaatttctacataaactgccccttaatttgcatataattaaaaatggatataaatatgagtgaatacagcagcacctctgagctgctactctgggcacactgccttttgggtagccctgattcttcactaaattttctgtttaacaccaccagctctcccttgaattcctttttgggtgaatctaagaaccctccagggctaagccctaatttttttttttttcttcagactgaatctcgctctgtagctcaggctgctggagtgtagtggttcgatctcagctcactgcaacctctgcctcctgggttcaagcaattctcctgcctcagcctccccgagtagctgggattacaggcacatgccatcaagcccagataatttttgtatttttagtagagatgggatattgccatgttggccaggctggtcttgaactcctgacctcaggtgatccacccaccatggcctcctgaggtgctgggatttcaggcattagccgctgcacctggcttttttttttttttttttttgagaaggggtcttcgacacccaggctggaatgcagaggtgcagtctcgactctctgcagcctcgacctctgggtgtcagatgatcctcccatttcaacctcccaagtagccaggagtacaggtctgtgccactacacccgcctaatttttgtaatttttgtagagatgggatcttgctatgttgcccaggctggtatcgaactcctgggtccaaatgatccacccgcctcgcatcccaaggtgctgggactacaggcatgagtcacccacccagcctaagccccaattttgggggcctgcttattcctgcatcaggaggagcactggaggccaggagtttgagaccccaacctgggaaacatattgagaccttatctctacaaaaaaagaaaaagaaaaaaattagctgggtgtggtggcacacacctgtgtcccagctactcaggaggctgaggtgggaggatcacttgagcccaggaggtcaaagctgcagtgagccatgatcatgccactgcactccagcttgggtgacagagtgagacccccacctctaaaaataaaaatagagcaaataggtctgggctggaggcagcccaagggtcccctggtttcatcactttccgtccatcttcccaaacgcatcaccttggcaagcacacagcaggcaggccagacagatgcgcccggtaaaaatacaagaagctaactgggcacggtggctcacacctataatcccagcactttgggaggctgaggtgggtggatcatgaggtcaggagttcgagactagcctggccaacatggtgaaaccccatctttactaaaaatacaaaaacacaaaaattagctgggcgtggtggtgtgtgcctctaatcccagctactcgggaggctgacacaggagaactggttgaacccaggaggcggaggttgtagtgagccgagatcgcaccactgcactcccagcctgggcgacagagtgagaccccatgtctacaaaaaataattctaaaaattagtcgtgtgtggtgtcgtgcaactgtagtcccaactactcagggggctgaggtgggaggatcacttgaacccaggagtttgaggctgcagtgagctgtgatcacaccagtgcactcctgcctgggcaacagagagagatctcatctctaaaaaaagaaaaaaggagccaggcacggtggctcacagctgaagtcccagcactttgggtggccgagctgggtggatcacctgaggtcaggagttcgagaccagcctggctacatggtgaaactccgtctctactaaaaatacaaaaaaaaagtagccaggtgtggtggcacatgcctgtagtcccagctactcaggaggctgaggcaggagaatggcatgaacccgggaggtggaggttgcagtgagctgagatcaagccactgcactccagcctgggcgacagagcaagactctgtcaagaaaaagaaagggaaaggaaaggaagggaaaggaaggggaggggagaggacaggaggggatgggagtggaggggaggggaggggagggggagagaaagaaaagaaagaaagaaaggaaagggaaggaagaaaagagagagacagaaggaaagcaaaagaaagagaaagaatagtaataaaagggaccaggtgtctgaaggctgagttgcagggtgccccattgctgaagaactgcttccagaatgcagctgtgtaagtctgccagtgtggccagtgtggctgggtgcaagctcttcagggtcccaggctacacacaagcgattttactttatttctaaaatggactaactcggtttgaaacttaacccaactcactcacaaaaggaatgttctctcatggccatgaatgcaaaaccaccacgagtggccacaaacaagtataaaatagacaaaatgaggcttggtgcagtagcccatgcctataatcccagcactcggggaggctgagggtggaggatcgcttgagctcaggagttcaagcccagccagggcaacatagcaaaaccccatctctacaaaaattagccgggcatggtggcatgtacctgtagtcccagctacttgagaggctgaggtgggaggatcacctgagcctaagagacagaggttgcagtgagctgagattgtgccaccacactccagcctgggtgacagagccgagactttgtctcaaaaaaaaaagaaatgaaaaataaaaataatgaaagtgcaaagagtatcatgacattctccctatactttgtcaagactgtaaggctgggaccagctcttttggctaaaaaaaaaaaaaaaaaaaaaaaaaattggattgggaagcatcggaggggcgtgaaaatcatgctagctagcacctctctaagaattgctttttttttttttttttttgagacagagtctcactctgtcacccaggctggagtgaaatagtgcaatctccttgcaaccttcactttctagattcaagcaattctcctgcctcagcctcgtaagtagctgagattacaggcatgtgccaccacgcctcactaattcttgtatttttagtagagggggtttcaccatgttggcgaaactggtcttaaacccctgacctcaggtgatccccctgcctcggcgtctcaaagtgctgggattacaggtgtgagccaccaggcccagcctgagacttgctttttttgagggattagagggattgatagttcagtaaaggaagtcactttctcactagtgattctgtggtactgaacccagggcctggtacccagggggcaagtgggcgagtggatgttccgggtcacccagccagccaggggaggagctgattctagatcttcccttatctctctgctgtttaaaccctttttgctccttccaatgggaaacagggaagggggaggctgtgggattggaacagaaagcgtcctggactccagaggccctgagcagccattcccctccctgggcctcagttttctcatctataaaatgggtagctgcagactagagagacaatttgtaaagttctgctgtgttagtcagggttctccagagaaacagaatccacaggcgtgagagaaacacacaaagagagagacagagagagacttatttgttttttagaggcagtgtctctttttctttttttcctttttttttttttttgagacggaatttcgctgtgtcacccaggctggagcgcaatggcgcgatctgggctcactgcaacctctgcctcgtgggttcaagcaattctcctgcttcagcctcccaagtagctgggattaaaggcacacgctaccatgcccaactaatttttgtatttttagtagagacagggtttcaccatgttggccaggctggtctcgaactcctgatctcaggtgatctgcctgcctcggcctcctaaagtggtggctcatgcctggccttcattttctttctaattttttttttaaattttaattagacaggatctccctctgtcacccatgctggagtgcagtggtgcaatcacagcgcactgcaacctccacctcctggcctcaagcaatcaatcctcccacctcatcctcccaaagtgttgggattacagacatgagccaccgcacctggtggatttcttttcttagaaaagcaatacatgctcatgataaaacgcaaggaattcaaaccctatcggagggggagcatattgaatggagtctctctctcagctcctcccttccccctaatatagctctgctaagagctgcccggtgtatccgccctggcattttctatttgcacaccagagtcgatacgaatatcctccttttactttcacaaatagggatcgttgcaggcacacagttccatgatagctttttccagttaattatatactgtggacaccttccccaaatcagcacatccagacctgcctcattctgcttaatgactgcagagtattggaagatgtgccttaagagagagggagagagaaaataaaaaatgatatgtttggaatgttccacctggtagtcccagatctgggttaatggaatgggagatcacactccagttcctccccatctcttctggcttgttttctgtttgtttgttttgttgttgttgttgttttttgaggtggagtttagctcttgtcgcccaggctggagtgcagtggcgtgataccggctcactgcaacctctgcctcctggattccagcgattctcctgcctcagccgcccgagtagctgggcctgtaggtgcaccaccacacccagctaatttttgtatttttagtagagatggggtttcaccacattggccagattggtcttgaactcttgaccttaggtaatctgcctgcctcggcttcccaaagtgctgacaggcgtgagccactgcgcccgacctcttctggcttttctatgtcttgggaaccaacacagttgtagtctctggccagctcgatttgagtgggacagacaggcttgtgtctgggtcagggtggaggtgccaagctcctgttccagccatcagcagtctgtggagaaaaaaaaaaaaagccaaactgaaccccagagccaagtgcatttcttgggacatagtttattgggactgggacctgctgtgaggctgtgcagacctcattgtcgagggcagctgccctgagagaacaggctaggaagatgcagcagggcaaatctatttccatcctgagtggtcacgtgcttcagcgggtcagccctggttggtccaaatccatctaatgctccattccctccctcgtaattgacttagggatggcccaccacctgtttttgtaaataaagttttattggcacacaattgtgctcatctgtttgcatgtcgtttggggcagctttcactcaaggacagaaccaaatacagatggtcccaacttaacgatggtttaactgacaatgtttcaactttacaatggtgtgaaagtgatacacatttggtagaaaccctacttcggggacccatacattgtgtttttcacgttcagtatagtattcaaagaattatgtgagatattcaacactttattttaaaataggctttgtgtttgatgattttgcccaaccgtgggctaatgttaagtgttctgagcatgtttaaggtaagttaggctaagctgtgatgttcactaggttaggtgtattccatgtattttcaacttgtgactctttcctttctcctttttcctttcctttaccttttcccttccttcctctctcctccccttccctccccttctcttttcttccttttgaaacagaattttgctccgtcacccaaggctagagtgcagtagttccatcacagctcactgcagacttgaactcccagctaaagcgatccttctacctcagcctcccaagtagctgggtctacaggcatgtgtcaccatacctggctaatttttaatttttttggtagagatggggtctcactatgttgcccaggctgataaactccagggcacaagtgatcctcccacttcagcgatgttttcagtttacagtgggtttattggaacatagttccattgtaagtcaaggaaaatcggtagttgcaacagagaatgtctggcttgcaaagctgaaagtacttactatctggtcctttacagaaagatgttgctgagccctgggctagtgtatactaacagcatgtgctacctacacctctctgcctgggggctttctcctggcccacatgtgggacaggtcagaagtgcccagggcacagccctcagtgtaggatgggtggtaactgtcaaatacctcagctttgtccgggtggtgcggtggcttacgcctgtaaaccccccactttgggaggccgaggtgggtggattacttgaggtcaggagttcaagaccagcctggccaacatggcgaaaccctgtctctactaaaaatacaaaaattagcagggcgtggtggtgggcacccgtaatcccagctactcgggagcctgaggcaggagaatggcttgaacccgggaggcagaggttgcagtgagctgacatcacaccactgcactccagcctgggcaacagagtgagactccgtctcaaacaaaacaaaacaaaacaaaacaaaacaaaaccccagctccctctccacttgggtgggatgtctccaaggtgcatgtgtcacacagttttcacagcaagccccagtgggattgggacccagcggctctcagcagtaactacttatttataccttgcatgggctgttctcatgttcctgtctcatttttcttctcccctatcagtgattcctggaatcactcagtcttagtctggtagggctaacaaaatatcacaaaacaacactaaatttcatgcagttctggaaactgggaagtccaagatcacggtgtcagccaattcagttcttggtgagggctcacttccttgcttgtgtacagccgccttctcaatgcatcctcctgtggcctttcctcagagtgcacacggggaaaaagagtgggctctgtgttgtctcttcttctaaggacaccaatcctattgaacaagggccccacccttatgacctcgattaaccttaattacctctatctaattacctaaaggctccatctctaaatacagccacactaggggttaggactttaacatgtgaatttggaggggcatgcacagttcagttccatcccagataaactgcttgcactcaaattcttactcctggatcgacttctgggaggcctcaaatcaagacaccacatgacagatttcaggttagggagaactgaaggcaagtaccaggaaggacttccttccttctagaaggcctcttcttcctctggaatctgctatttctgcatgtgatggctggagtcttggaagctgtcttgggaccatgaggagggaatacccttaggacaaagctgagatgctggggaaggtggactggacagacagaaagaacctggttgatggtatcatgaggccactgaattaaccgctagagcttccctaaccctgaatttattgttctgtgaaatggtgactattattattgtttatgttagcttgtgtagggattttcatcttcctttctgatagaggtgaggcctgaagtgggagggtggatgattaatccaatggagtaaagacaggtgctccttttttttcaaagagaagagattcgctcatacaactgaaaaatgtacacctttctggttaggggagattacagctggggttgcagcagacagaacatttttgttgttgttagcacataagagaatccttacctgccacaactaattaagaagagaagaggctgagcatggtggctcattcctgtaatcccagcactttcggaggctgaggcaggaggatcactggagcccaggagtttgagactagcctgagcaatatagcaagattctgtttctatcaaaagatctttttttaattagctgggcaatgtggagagcaactgtagtcttagatactcaggaggctgggaccagaggatcccttgaacccaaaagttcgaggctacagtgagctatgactgatgtcactgcccctccagcctggacaacagagcaagaccctgtctctgaaatttgtttttttgagacagagtctcggctcactgcaaattttgcctcctaggttcaagcgattctcagcctcccgagtagctgagattgcaggtatgtgccaccacacctggctaatttttgtatttttagtggagacagagtttcagcaggttgcccaggctggtctcaaattattagcctgaagtgatccacctgctgtggcctcccgaagtgatgggattacaggtgtaagccaccgcgcccagcctgaaaaaaaaaatttttttttaaagagaagagatttgctcacacaactgaaaaatgtaaagaagcagtatatcttcaggtgtggctggatccagatgctgagatcatgtcaccaggagtctgtttttgtccatctcttcatagatttgtttaatctagttgctgcctcagcagccatttttaggcctgacctaagttgtttgaagcacagttgtatcccatcacttttggcttagttaaaacttccccttcctggccgggcgccatggctcatgcctgaatcccagcactttaggaggccgagacgggcggatcacgaggtcaggagatcaagaccatcctggctaacacagtgaaatcctgtttctactaaaaatacaaaaaaaaattagccaggcgtggtggtgggcgcttatagtcccagctacacaggaggctgaggcaggagaatcacttgaacctgggagacggaggttgcagcgagccgagattgcgccactgcactccagcctgagagacagagcgagattctgtctcaaaaaaaacaaaaaccaaaaaaaccaaaaaaacaacttcctcttcctggtggggtgcaatggctcatgcttgaacccaggagatggaagttgcagtgagctgagatggcaccactgcacttcagcctggattacagtgtgagactctgtctcaaaaacaaacaaacaaaaacaaacacaaataaacaaaaccaaccaaccaaatggcaacaacaaaaacttccccttcttggctgggtgcagtggctcacgcctgtaatcccagcactttgggaggccgaggcgggcggatcacctgaggtcaggagtttgagaccagtctggccaacatggtgaaaccctgtctctactaaaaaatacaaaaaaattagccaggcatggtggcgggtgcctgtaatcccagctacttgggaggctgaggcaggagaatcacttgaacctgggaggtgtaagttgcagtgatccaagatggtgccattgcagtccagcctggacaacaagagcgaaactccatctaaaaacaaaaaacaaaaaaaacccaaaaaaaaccccaccaactttccctttctgtgtggttgtttgtgatgtagttcacttgttcctcatcctactaacccaaaacataacacatcccacaactgccaaccacagtgaaacctaatggccaacactagagctatataaataagttcccttttctttaaactagttttatttaaacaagtccatccgcaacccccatgggacaatatgttgcccaggcttgtctcacgattctcccatcccagcctcccaaagtgttggaattacaggcatgagccacagtgccaggccgctgtttgtattcattacgtttttttattttctgaattttatgatgctttgacatttggaggcttactgatcctggagagactgctcctcccagggctagctaattcctagagatagcaaacaacacagctgtgagcgtatgtttaatatacaaaccaagcagtccagagcccaacccccaactatctcctttatcaaactctgacacaccaagacaatattcctcctgcctaaatcaccccagagtcaggtatggacaactagagatcaccccataactcagagactgccaaaattatttgaaccatcaaaccttcttttttttttttttgagatggagtttcgctcttgttgtccaggctggagtgcaatggcgcgatctcggctcaccgcaacctccgcctcctgagttcaagtgattctcctgcctcagcctcccaagtagctgggattacaggtgcctgccaccacgcccggctaattttttgtatttttagtagagacggggtttcatcatattggctaggctggtctggaactcctgacctcaggtgatccaccttccttggcctcccaaagtgctgggattacaggcgtgagccaccgcgtccggccgaatcttcatttttatttatatttttttgagacagagtcttgttctgttgcccaggctggagtagagtggtgtgacctcaactcacttcaactccacctcctaggttcaagtggttctcctgcctcagcctcccaagtagttgggattacaggcacacaccactatgcctggctaatttttgtatttttagtagagacgaggtttcaccatgttggtcaggctggtctcaaactcctgacctcaagcgatccatccgcctcggcctcccaaagtgctgggattacaggtgtgagccaccgggccccgccatatttaaattttttttgaggctgggtgtggtggctcacacctgtaatcctagcacttttggaagccgagggaggaggatcccttgagcccaggagtttgagaccagcctgggcaacatagcaagaccccatttctacaaaaaataaaaataattagctgggtgtggtgtgtggtggcgtgtacctgtggtcccagctactcaggaggctgaggcaggaggatcacttgagcccaggaggttgaggctacagtgagctatgattgcaccactgcactccagctatgcttgcctcactgcactccagcctgggtgacagaacaagattctgtctctaaaattaaacaaacaaaaaaaagtgaataggatcatcttggctgtagaggggaggagagaatttagagaggctggagcgggggacaggagtgtgatatgattagaaataggagttggagccaggcgcggtggctcacgcctgtaatcctagcactttgggatgccgaggcgggcggatcacgaggtcaggagatggagaccatcccggctaacacggtgagactccgtctctactaaaaatacaaaaaattagccgggtgtggtggtgggcgcctgtagtcccagctacatgggaggctgaggcaggagaatcacttgaacctgggagacggaggctgcagtgagctgagattgcgccactgcactccagcctgagagacagagcgagagtctgtctcaaaaaaaaaaaaaaaagaaaaaagaatgtctccccaaggagcctggcgtgttggtgcgctcctataatcccagctacttgggaagatctcttgagcccaggagttcgagaccagcctgggcaacagagcaagaccccaactgaagaaagaaagaaagtcccccagagaccagagcttcctggggattgggaggccgtgtaatgggctatattatggggcccattggtggctcacttctccgtctagcccagaaattgtcacccgggatgattctgtctcccatggggaccatctagagacgtacttagtggtcacaactggaggcggggattgttactggcatctcggggtggaggccggggatcctacgatagctcccaaaacagacagtgaatggtctggttccaaatttccctagtgcctaggctctgcctcggacaggagccgcagccggggtgggggcaggggtgccaggacatcagaaacatcttatttatttatttgtttactttttatttgtttgtttactttttatttatttatttatttatttattggagacagagtcttgctctgtcgtccaggctggagtgcagtggcacgatcttggctcactgcaagctctgcctcctgggttcaagccattctcctgcctcagcctcccgagtagctgggactgcaggcgcccaccactatgcctggctaattttttttttttgtatttttagtagagacggggtttcactgtgttagccaggatggtctcgatctcctgaccttgtgatccgcccatcttggcctcccaaagtgctgggattacaggcgtgagccaccgcgcccagctacttatttttttgagacggagtctcactctgtcacccaggctggagtgcagtggtacgatctcggctcactgcaacctcctcctcccagttcaagccattctccttcctcagcctcccgagtagctgggattacaggcgcacaccaccgcacccagctaatttttgtatttttagtagagatggggtttcagcatgttggccaggctggtctcgaactcccagcctcaggtgatctgcccaccttggcctcccaaagtgctgggattacaggcgtgagccaccgcaccctgccagaaacattttaaagctccccagggtgactttcaggtgcagccaggcttgggaaccgccagtgcagagggtcagagggttctcccgtccggtcccctgctgcaccacccggaacctctctctcggttccccctctactgggtgtctgtggacagagagggtgggaagatctgctggtggaaacagcctcagcctctgagccccctagccccaggcccaggttctcctgcggatccctggcctggtgacctggcttgcgctgggggatcccagtgacctccttcgggcccgcagaggtctcctgaggctgctcaggacttcctctccctcagcctctttgccctggctagggagagagacaggaatggggccaacaaagggaataagaattctggagggggccgggcatggtggctcacgcctgtaatcccagcgctttggggagctagggcaggtagatcacctgaggtcaggagttcgagaccagtctggccaacatggtgaaaccccgtctctactaaaaatacaaaaattagccaggcatggtggcaggtacctgtaatcccagctgctcaggaggctgaggcaagagaatcgcttgaacccacgaggtggaggttgcagtgagccgagatggcgccgctgcctgagtgacagagcaagactctgcctcaaaaaaaaaaaaaaaaaaaaaagggaatttgggaggggagagaagtaaccctggtgtgaagtgtgaaaggagagaacttagggcaggaggagcagggtggaagagaacggcggccaggcctggagcacacgtgcattctcagcaaacaggggccctgtccccaggacatacactcacactcaacactcacacttatgctctgtcacactcacacagtcacacgcatgctcatacatggtctcacacactcatcctcacacagccccacagccttgcacactcccacccaccctcacacagccccacagcctcgcacactcccacccaccctcacacagccccacagcctcgcacactcccacccaccctcacacagccccacagccttgcacactcacacgcatcctcacagccccccagcctcacacactcccacccaccctcacacagccccacagcctcacacacatccatcttcacaagtctcatacccttcacatcacacacattgttgcacaaatgcagactcacacattcacacaggaacacacaaccacatgctcacacctataggcactcacactcacagtctcacagtctcacacattctcacacacatgcgtacacacacacattctgcaaacacccgtggcctcctctgccttcgccccctcccaaagctgcctgaagactctccagatgtcacctactgctgctgctgtggcctgagcaggaggggagtgcagaaggggaggctgggtgggaggggagcaggggcccgaagatgccccaaatccctctgcttcatgactagccccatttagagagaggatcaccctttgaaaaccagaacccctcaacgccagcaccccctgggtctccgggatgaggaggaccaggaaaaccctcccagacaaaggaatggctccaagcctggagtgatgagggtgcctgagattctttgctttttgttcattcattgattcatcttgcatgttattattattttgagacagagtctcactctgtcacctaggctgcaatgcagtgacaccatctcggctcactgcaacctctgcctcccgagttcaagcgattcccctgcctcagcctccctggtagccgggaccacaggtgtgcgccaccacacccagctaatttttgtatttttagtagaaacggggtttcaccatattggtcaggctgttctcccactcctgacctcaggtaatctgcctgcttcagcctcccaaagtgctgggattacacgcatgagccactgtgtcaggcctgatttttttttttttttttttgatggagtctagctctgttgccaggctggagtgcagtggcacaatctcagctcactgcaacctccacttcccagattcaagcaattctgcctcagcctcccgagtagctaggattacaggcacgcactgccatgccaagcgaatttttgtatttttagtagagacggggtttcaccatgttggcctggatggtctcgatctcctgacctaggatctgcccgactcggcatcccaaagtgcagggattacaggcgtaagccaccgtaatttttgtatttttagtagagacggggtttcgccatgatggccaggctggtctcgaactcctgacctccagtgatccacccgcctcagcctctcaaagtgctgggattacaggcgtgaaccactgcaaccggctcatcttgtatattagatccagcggtttctgtgtgtcccactctgtccacgccactgggggcaccacagcacccaagacagaaatccccacctacatggggctgatgtccagtggagagtcagacataaacaaaagtatggatgtgcatgtgtgacagagagaagcctcaacaagggatataaagggggaaaaaaagagctgagcccagtggctcatgactgcaatctcaacactttgggaagccgaggcaggaggattcgctggagcccaggagttcaagacaaatctgggcaacatagcaagaccccatctctacacaaaatttaaaaaattaaattgggccgggcgcagtgactcacacctgtaatcccaacactttggtaggctgaggtgggcggatcatttgtgggtcaggagtttgagaccagcctggccaacatggtaaaatgctgtttttactaaaaatacagaaattagctgggcgtggtggtgcacacctgtaatcccagctactcaagaggctgaggcaggagagttgcttgaacccagctgggcgtgatggctcacacctgtaatcccagcacttcaggaggccgaggtgggcggattacctgagatcaggagttcgagcacagcctgaccaacatggtgaaaccccgtctctaccaaaaatacaaaattagtcgggcatggaggcgcatgcctgtaattccagctacttgggaggctgaggcaggagaattgcttgaacccgggaggctgaggttgcagtgagccgagttcgcaccactgcactccagcctgggcaatatgagcaaaactctgtctcagaaaaaaaaaaaagaattgcttgaactcaggagatagaggttgcagtgagccaagattgcaccactgcactccaactgggtgacagagtgagactccatctctgaaaacaaaataaaataaaaataacaaagaaaaccagctgggcatgttggcataaccgtagtcccacctacttgggaggctaaagcgggaggattgtttaaactcaggagttgcaggctacaatgaactaagatcgcgccactgcactccagcctgggtgacagagagaaactctgtcccaaaataaattaaattaaatttgccaggcgcagtggctcacgcctgtaatcccagcactttgggaggctgaggtgagcagattgcctgaggtcaggtgttagagaccagcctggccaacatggtgaaaactcgtctctactaaaagtacaaaaattagccaggcatggtggcgggcacctgtaatcgcacctactcaggaggctgaggcaggagaattggcttgaacctgggaggcagaggttgcagtgagccaagatcgagccactgcactccagcctgggtgacaagagcaagactctgtctcaaaaaaaaaaaaaaattaaattaaattaaaacccaaaaacagtggagtctgggcctctcaggctgggtgcaccccaggggacttcctctctgatagtctccttgccctctacacctaacctggcctctacacctgggacccctgttccctgaggccccacccataaccacatccacgtctggtgggatccagcacctaagtccgctctagtggacggcactccttccccgagtccccactggcgaggaccatgagcaattcaatcccattctccacccagagactttgctggaaaagagctaattatatctctgccccggagcccatctggtggggtctgggtggtgacgggcgagtgtgttccgcgtccacggccggcggcacgcgcacaaacacagcttcccatatatttttaattccacagccatactttgattagagagccgatgtgttgtgtacgacctcagggacctcattatttttctaactcaaataaatacggcgttcagaattcggggagggttggagggggtgtggagtaaaagacgcagaaaactccatctataaaaagaattcaggccttaatgagcttttaaaacttgccaacctctctcccaccccctgacaccaatctataaacaggagccatgcctgctggctttgatggtgggagtctaggtgggtgaggattggctggggtgggtgttgcggggcaaagccacagcaggggagaggcccccctgcaaaggtagctgggtgtctgtaagatttggggaagggggatggcaggcacagtggctcatgcctataatcccagcactttgggaggctgaggcaggaggatcgcttgaggccagaagttggagatcagcctgagaaagatagcaagaccctatctctacaaaaaaatttaaaaattagcctggcgtggtagcgtgtgcctgtagtcccagctactctggaggctgaggtaggaggatggcttgaaccctggagtttgaggctgtagtgagcttagattgtgcctctgcactccagcctgggtgatacagcaagaccctgtctctggggaaaaaaaaaaaaaaaaaaaaaatatatatatatatatatatatatatatatatacacacacacacacacacacacacaccatacatatatataaaaacataaatatatacatatatacatatatagacatatacatatatagacatatacatatatacacatatacatatatacatatacatatacacacatatacatatatacatatatatgtgtatacatacacatatatacacacacatatatatacatatatatatatatatacacatatatatatatacacacacacatatatatatatatatatttgggcaagtgtgttcccagccacagggagaatggaagtggtctctatccaagttcagcaggaatcgtcaatattcatgggcccaggctaactggggtgttgatctgagaaagatttagaatttcctgatctcctagacccatttgggctgtggtatgaggatgagttctgcttcattattattatttttgagacagagtttcgctcttattgcccaggctggagtgcagtggcacaatctccactcaccacaacctccacctcccgggttcaagcaattctcctgcctcagtctcccaagtagctgggattacaggcgcgtgccaccacacctggctaatttttgtatttttagtggagtcagggtttcaccatgttggccaggctggtcttgaacccctgacctcaggtgatctgcccgcctcggcctcccaaagtgctgggattacaggcgtgagccactgcacccggcctctgcctcattcttgtatgtctggaaattcttccccagaggctcccctgggagttgctgagatgagcagatggggaaactgaggcagagcaaagcaggctggaccacaggatatgtattgggtgccctccccacccacttggagtcagctagaccccaccttccttcgcagtggataagccctggctggggttgggggttccccgttgagcaggcaccagccgaaggaggccccccagtggccgtggtgttacggtgaggtggacggagagcaggcagtgaccacggggctcccgaaaggacagggtgaccttcgagtcactacccatgtgcatcgttccaacagcagcaaagacactcccggagcaggcagcaaagccaatttcaggtgaaagatgagttaagtgggcagaaatgagctccgggctgagaaatttctgcatgacaaaaattccagggagcaggacagaccttaggagcagctgagcaagagcctctggaaggactcagggggataggaggggagggaagggatgaaaaacaagatcgggacatgcaataatgtggtgaatgggggcaggaagggggcaggaagatactggggtctgcacaatgcggggagaggggttttccctgcccctcaatctgaaatggcagcccctgtctcttgcttttccccctaccctctccctgctgttgttttctatttatttatttatttatttttgagacagagtttcactcttcttccccaggctgaagtgcaatggcgcaatcttggctcacctcaacctttgcctcctgggttcaagcgattctcctgcctcagcccccagagtagctgggattacaggcacacgccaccacacccggctaattttgtatttttagtagagtcagggtttctccatgttggtaagtctggtcttgaactcccgacctcaggtgatctgccagtctcggcctcccaaaatgctgggattacaggtgtgagccaccgtgcctggctgttttctttatttctttgattttagagacaggatctcactctgctgcccaggctggagtgcagtggtgcaatcatagttcactgcagcctccaactcctggtctcaatccatcctcctgcctcagcctcccaagtagctgggactacaagtgtgcaccaccacgctcagctaatcttttaatttttgtagagatggggtctccctatgttgcccaggctggtctcaaactcctgggctcaagcgatcctcctgcctcggcctcccaaagtgctgggattacgggtgtcagccactgtgcccagcttctgctatagttttctgtttgagatttcttcatcaccctctgtcatgatgtttgtcatccgcctctctcatcagactggccacctaccttgccccacctgaaggcagagagtttcgtctgtcttcctgaaaggtaggcagaaagatgtcagctgggaggggccttctagatgggtgtaaacagtggtgtgcttgtgaacctgttgtggggagagaagaggatttgtagtgtttgccaattccagcggtgtaaattctgccaccttggctgacttcaagctgtgaatgtaagatttccttgacagggtgggggaagtttgagggggcaaggggattgtgaggtggtgtccagatgggtgtaatcaatgatgagccggtaagccagctgcagagaggagacccaatttgtagtgtttgccaatttccatggtgtaaattcttcccccttggctgaattcaagctatgagtgtgatgccactgaatcccaacttaggaagagattgcataatgaaatgactcttgtgagccactttgacccagctcaagtataccgtggggtggaatctcctggcctggagttgaccctttctccagtttgggattaggaggaagggaagacaagtaagagggtgaagccagtctccctgtcttccttccatcctggggccattctactccctgggacctctgctggggatgctcttccatcagatactgataactgagctgtccccacccattctgcatagaccccatccagggcccctgctgggaaaccaagagtttgtccaagtggcgacatggggacccctacccactgctatctttgctgcctctttttttttgagacagagttttgctcttgttgccaaagctgcagtgcagtgatgcgatctcggctcactgcaacctccgcctcccaggttcaagtgattctcctgcctcagcctcccgagtagctgggattacaggcgcgcgccaccacacctggctaatttttgcatttttagtacgaatggggtttcaccatgttggccaggctggtctcgaactcctgatctcaggtgatccgcctgtcttggcctcccaaagtgctgggattacaggtgtgagccaccatgctcagttgccttttttttttttcctttttcttttttttttttagggacggggtcttgctgtcacccaggttggagtgtagtagtgtgatcatagcacactccagcctcacactcctggactcaagggatcctcccgccttagactctggagtaactgagactactggcacgctccaccatagccggctaagttttttagtttttgtagagaaagggtcttgcattgttacccaggctggtctcaacctcctggcacaaacgatcctcccacctcaccctctcaagtagctgagactacaggcatacactaccacacccggcttttatggatttttaaaactgattcataatagaggtacatattttcagggtacgtgatattttgatacattcatatcatgtgtagagatcaaatcagggtaattgcagtatccatcatcttaaaggtttatcttttctttatgctaggaatgctcaaaatagctctcctaccttttttttttttttttttttcgagacagagctttgctcttgctgcccagtctggagtgcaatggtgcgatctcagctcactgcaacctccacctcccgggttccagccattctcctgcctcagcctcccgagtagttgggattacaggcaagcatcaccacgcctggctaatttttgtatttttagtagagacagggtttcaccatgttggccaggctggtctcgaactcctgacctcaggtgatccgactgcctttgcctcccaaagcgctgggattacaggcatgagccaccatgtctggcctctcctagctattttgaaatgtataatggattactgtttactgtagtcaccctactgatctatcaaacactaagtcttgtgtgctcaagagcagtgtgagcacccagctcagctgtctgagcttggccctgtcactttccctcctggagcctcagttttcccttctgtgaaatgggtatatattagtgcctgcctctaatacagtgttgtgaggcttcaggaagggagtatttggttcctgtacctctagagcaggggtttctttcctctcttttcctttctctcttttgctctctcttttttttttttaaacagagtctcgctctgtcacccaggctggagtgcagtggcatgatctcagctcactgcaacctctgcgtcccgggttcaagtggttctcctacctcagcctcccgagtagctgggattacaggcatgtaccaccacacctggttaatttttgtatttttagcagagacgggatttcaccatgttagccaggctgatcttgaactcctgacctcaggtgatccactcgtcttggcatcccaaagggctgtgattacagttgtgagccaccaaacctgacccttcctctctccttccttccttcctttcctctcctccttccctccttcctttatttctctcttttttttctttctctttctttctttctttctttctttctctctttctttctttcttttttctttccttctttctttctatttttctttctttctctctgtctctctctcctttctttctttcttctttcggtcttgctctatcacccaggctggagtgcaatggtgcaatcagagctcactgcagccccaaactcctgggctcatgctatcttcccacttcagcctctggagtagctaggactacagatgcacgccaccaggcctggctaatttttttttttttttttttttttagagacagagtcttgctatgttgcccaggctggagtttcttgacctgagcactgctgacatttggggctgggccattctttgttggggggtcctgtcctgtgcattggtggatgtttagcaggatcccaagtcgcaacaaccctaaatgtctccagactgcagggacgcaggcaaccacacagggaggaagcggagagtcaatgctccccacctctctcctctgccttctaaccttcttttgaggctttctattggctgaacctaactgaagccagaggacaagggagctattaatgggttctttgtttgtttgtttgcttttgagacagagtctcactctgtctcccaagctggagtgcaatggcatcatctcggctcaccgcaacctccgcctcctgggttcaagccattcttctgcctcagcctccagagtagctgggattacaggcatgggccaccactcctggctaattttcaggttttgttgttgttgttgtttgtttgtttgagacagagttttactctgtcacctaggttggagtgaagtggtgcgatctcagctcactgcaacctctgcccccagggttcaagtcattctcctgcctcagcctcccgagtaactaggattacaggcatgtgccaccacgcccggctaatttttgtatttttagtagagctgggatttctccatgttggccaggctggtctcaaactcctgacctcaagtgatccacctgcctcagcctctcaaagtgctgggattacaggcgtgaggcactgtgcctggcaatgggttcttacatatcagcctcctaggcatggaacagggcggaagaagatgaagagtggcccatatcccaaagatacaccgctcagttttccttattcccctctgcatgcaaagacttcagacttccatcactgtctgaaggctgtcccgatcagctcctgccccactgcccctctgtcactcacgggtgtctcccccgtgaatctcttgtactttcttttttttttttttttttttgagacggagtcttgctgtgtcgcccaggctggagtgcagcggcgcgatcttggctcactgcaagctccacctcctgggttcacgccattctcctgcctcagcctcccgagtagctgggactacaggcgtccgccaccacgcccggctaatttttttgtatttttagtagagatggggtttcaccgtgttagccaggatggtctcgatctcctgacctcgtgatctgcccgcctcagcctcccaaagtgctgggattacaggcgtgagccacggtgcctggccgaatctcttgtactttcaactccatctcagcatcagcttctcagaggacctgaactgatgcaaggggcacgtcttcgtcagcttggactgtgtattagtcaaggctcgccagagaaacagaaccaataggatatatatagatacagagaaggagatctattatgagagattgactcatgtacttatggaggctgagaagtcctacaatctgccatctgcaagctggagactcaggaaagctggtggtgtgattccagcccaaactcaaaggcctgcacaccaggagagcagatggggtaagtcccgggtccgagaccaaaggcctgagaaccaggattgccagtatctgaggacagaagaaaacggatgtcccagctggagcagagagaatgaatttaaccttcctctgccttttggttctagccatgtcctcaatggattggatgatgcccacctacattagggagggtggatcttctttcctcagtctactaattcaaacactaatctcttccagaaagcctcacagacacaggcagaaatcatgtttcaccaggtctctgggtaccccttagttaagttgataacgcagaataaacatcacaggctgccataagaaaatacgataaattggctgggcgcagtagctcacacctgtaatcctagcactttgggaggccgaggcaggtggatcacctgaggtcaggagttcgagaccagcatggccaacatggtgaaaccccgtctctgctaaaaatacaaaaattagccgggcatggtgttgggcacctgtaatcccagctacctgggaggctgaggcaggagaattgcttgaacccaggacgtggaggttgtagtgagccgagatcatgccactgcactccagtctgggcaagagagcaagactttgtctcaaaaatgacaacaacaaagaaaataccatagactgagtggcttaaacaacagaaatttccttctcacatttatagaggctggaagtccaacagcaaggtgtcagcagagttggttcctggtgaggactctcttcttggcttgcagatggccgccttcttgctgtgtcctcacatggcctttcctctgtgtgcttgaagagagagagagatctctggcatctcttcctttccttataaggacaccagttttattggattaaggcctcaccctgatgaccccatgtaactttcattacctctttaaaggccctatgtccaaatatagtcacattgggggttaggacctcaccattttaatttggaggggcacaattcagtccataatgggacaaatgaaaaacattcagcacacagccagcctgcaagctccccagttacatatagactcacagacctttcatgaatagtggctggatcccctcattactttgtagttcaacgacaggaggactggagtgggggtctgctgggctgcatgcagtggctagtatatgtatggatggggtgtttgggatggatgtcagaagccccccaaaggtgtaattgatgcaggacagtgttccagagctgaagatcatcccccacccccatgacatgggttcccagcccccctgcccatcaaggttgtccagaggcagctgcataaggaacaagaaagccccagcgggtggtgcaccagcccagttctccacctctccaagtccaagctgagcagacatgggtgactgctttctggttctatatttggtcaggaggaggatttcctgtccttgaaaaaattcctgagatcctgggaagatgtgaaagccatggcaatttgaggggggcagggaggggaaggaattgtatgcagacagttcagctcaaatgagaggaggacaactaggaccccaagttgcaaagtctggctgcaaaaccagaagcttgtgatggagccccacaccccagggagacaggagagcatggtaggtgtatatttaaattaaatccagcagtccaggcacggtgactcacacctataatctgggcactttgggaggcaaggcgggcagatcacttgagttcaggagttcaagaccagcctggccaacaaaaggaaaccccatctctaataaaaatagaaaaattagccagatgtggtggtgcacacctgtaatcccagctacttggaagactgaggcaggagaatcacttgaacccgggaggcagagtctgcagtgagccgagatcgcaccactgcactccagccagagtgagactccatgttaaaaaaaaaaaactgctgagcaaggtggctcaaacctgtaatcccagcactttgggaggcagaagcgggcagatcacttgaggtcaggagttcgagaccagcctgggcaacatggtgaaacccccgtctccaaaattagctgagcatggcagtgcgcttctgtagtcccagctactcaggaggctggggcaggagaattgattgaacccagaaggtggaggttgcagtgagccgagatcacgccactgcactccagcctgggcatcacaacgagaccccgtctcaaaaaaaaaacaaaatccagtaaacagttcagacatggtggctcatgcctgtagtctcaacactttgggaggccaaggcagtagggttgcttgaggccaggagttcaagaccagcctgggtaacatagtgagaactcgtctctacaaaaaatttaaaaatcgctgggcgcggtggctcacgcctgtaatcccagcactttgggaggctgaggcaggcagatcacgaggtcaggatatcgagaccatcctggctaacacagtgaaaccctgtctgtactaaaaatacaaaaaaattagctgggcgtggtgacaggtgcctatagtcccagcttgtcaggaggctgaggcagaagaatggtgtgaacccgagaggcggagcttgcagggagccgagattgcgtcactggccactgcactccagcctgggcaacagagcaagactctgtctaaagaaaaaaaaaatgtaaaaatttagccaggtgtgttggcagatgtctgttgccccagctgattatgtgagtttgagactggaggatggcttgaacccaggaggttgaggctgcagtgaactatgatcacaccattgtactgcagcatgggcgacaaaatgagaccctgtctcaatcaatcaatcaatcaatcaataaaatagaaattgccctttaagctaggcacagtggctcacatctgtaatctcagcactttgggaggccaaggtgggaggactgctcgagctcaggagatcaaggctgcagtgagctatgattgtgtcactgcagtccagcttgggcagcagagcaagaccccaactcaaaaaataaaaattaaaattaattcattaaattcagtaaacaaaacagacaaagtcccttgtcctcacagagacaacattccagtgggggaaggcgacaatgagttagttaaataaaataagtggtaggttcaacaaggaaaataaagtaaagaaaaaaataggctgggcccagtggctcatgcttgtaatcccagcactttgggaggccgaggcgggcagatcacaaggtcaagagattgagaccatcctggtcaacatggtgaaactctgtctctactaaaaatacaaaaaaaattagccaggcgtggtggcatgcacctgtagtcctagctacctgggaggctgaggcaggagaattgcttgaacctgggaggcagaggctacagtgagctgagattgcaccattgcactccagcctgggcaacagagtaagactccatctcaaaaaaggaaaaaaaaaaaaaaaaaaaaagcaagggagacaaacaggaagtgctgaggatcggggttgcaattttaattgggtgtccagggaaggcctcactgggaaggtgactcctttttttttttttttttttttttttgagacagtctcgctctgttgcccaggctggaatgcagtggcccaatctcagctcactgcagcctctgcctcctgtgttcaagcgattctcctgcatcagcctcctgagtagctgggactacaggcacgcgcctccatgcctggataatcttttgtatttttagtagagacagggtttcaccacgttggccaggctggtcttgaactcctgacctcgagcgatctgcctgcctcggccacccaaagtgctgggattacgggcatgagtcactgcgcctggcctgaaggtgactcttgagcaaagagttgaaggaggtgagggagttgtattagtcagttatggctgcctaacaaattgccccacccccaaaatctcagcaacatggattatctcacagtgtctgtgggtcagaaatctggatgtggcttagggccactcacaagtctgtagtcaaggcatctgctgggctatagccttcccaaggttcaactgggaaggacccacttccaagctcacacatgtggctgttgtcagaattcagttccccactggctgttggctgaaggctagtctcagttccttgacacgtgggtctctccaaagagcatctgagaacatgggcactgacttcatcagagcaagccagccagtgggcaagacagagtgctgacaagaaggagggaattcagcaggacagacatcatggttttgttttgttttgtttgagatggagtctcactctgttgcccaggctggagtgcagtggcgcgatctcagcccactgcatcctctgccttctgggttcaagcgattctcatgcctgagcctccccagtaggtgggactacaggcaccaacacacccggctaatttttgtgtttttagtacagacggggtttcaccatgttggccaggctggtctcgaactcctgacctcaagcgatctgcctgcctcagcctcccaaagtgctggcattacaggcatgagccaccatgcccggcccagacatcacggtcttttataacctaatcttagaagtgacatccatcatttttgccatgttctttggttagaaaggagcccctcggctgggcgcgatggctcatgcctgtaatcccagccctttgggagaccgagatgggtggatcacctgaggtcaggagttggagaccagcctggccaacctagtgaaacttcatttctactaaaaatacaaatattagctgagcgtggtggctcaagcctgtagtctcagctactcgggaggctgaggcaggagaatcacttgaacccgggaggctgaggttgcagtgagctgagatcacgccgctgcactccagcctgggtgacagagtgagactctgtctcaaaaaaagaaaaaaaagaaatgagttgctagatccagcccacactcaaggggaggggattagacaaaggcctgaaggccaggaggcagggacccttggaggctgtcttagatactgcctcccacagcaaccatcagggggaacagcattccaggcagaaggaacggcaagtgcaaaagccttgaagcaggaacaagcgaagccatgtggtcaggacaagagggagtgcagtgtggctggagcaggaatttgggggcgggagagttagaacatgaagacagagaggccagcagtggtcctggggaccctatgagaagtaactttctgaattttttctaagaaccatgagaaaccacagtgcaatttcaagccaacacatgatgtcatctgatttaagattcctacgatacctactgaagtaatatggtatctggtatttgatttaagaaatctctttttttttttgagatggggtatcgctctgtcacccaggctggagtacagtggcacgatcttggctcactacaacctccgcctcccaggtacaagcatttctcccacgtcagcctccaagtagctgggatgacaggggtgcaccaccacacccagctaatttttgcatttttaatagagacggggtttcaccatgttggccaggctggtctcgaactcctgacgtcaggtcatccacctgtctcggcctgccaaagtgctgggattacaggtgtgagccgccacaccccactgaaagctcattattctaaaagttgggtgagcagggcacagtggctcacgcttgtaatctcagcaccgaggtgggaggatggcttgaggccaggagttggagaccagcttgggaaacatagtgagaccccatctttacaaaaataaaaaattaacacacctgtaatcccagctgaggcgggtggatcacgtgaggtcaggagttcgagaccagcctggccaatgtggtaaaaccccgtatctactaaaaatacaaaaattagcccagcatggtggcacactcctgtcatcccagctactcaggaggctgaggcaggagactcatgtaaacctgagaggtggaggttgtaatgaaccgagatcaccaccactgcactccagcctgggcgacaaagagactccatctcaaaaaaaaaaaaaaaaaaaaaaaaggccaggtgcggtggctcatgcctgtaatcccagcactttgggagaccgaggcgggcagatcacgaggtcaaaagagcaagaccatcctggccaagatggtgaaaccctgtctctactaaaaatacaaaaaattagccgggcgtggtggcgcatgtctgtaatcccagctactcgggaggctgaggcagaatagcttgctcatctgctgctggtttgcatgtgaaatggcacaaccactttggaaaacaatttttatttttatttatttatttttaagacggaatcttgctctgttgcccaggctggagtgcagtagcacaatatccgctcactgccacctccgcttcccaggttcaagcgattctcttgcctcagcctctggagtagctgggactacaggcacgaaccaccacgcccagctaattttttgtatttttagcagagacggggtttcaccatgttagccaagatggtctagatctcctgacctcatgatctgcctgcctcagcctcccaaagtgctgggattacaggcgtgagccaccgcgcctagccgggaaacagtttttaaaataaagttacattgggaggccaaggcaggcagattgcctgaggtcaggagttcgagaccaatctggccaacatggtgaaacctcgtctctactaaatatacaaaagaaattagccgggtgtggtggtgggcacctgtaattccagctactcatgaggctgaggcaggggaatcgcttgaaccagggaagtgggggttgcagtgagccaagatcatgccactgcaggccagcctgggtgacagagtgagactccatctcaaaaaatatataaaataattaattttaaaaaataaagttagacttaccattcatcccagcaattccattgctatacatttacccaagagaaaagaaagaatatatccatataaagacttgttggcaaatgttcatagcagatttgttcaattattgctgaaaaactggaaacaatcaaaatatctacagacaggagaatataaattaaggcccatccataggatgtagtaattcttagcaacaaaaaggaacaaactactgattcacacaatgttgataaatctcagaatgcatgatgctgagtggaagagagaccacactgtgtgattttatttatctgaaattttgcaaaaggctcaactaatctaaggtgatagaaatcagaatagtagccaggtgcagtgactcacgcctataatcccagcactttgggaggccgaggtgggcagatcacttgaggccaggactttaagaccagcttggccaacatgtcaaaaccccatctttacaaaaaatacaaaaatcagcggggtgtggtggcgtgtgcctgtaatttcagctactttggagactgagacatgagaatcgcttgaccctgggaagtggagggtgcagtgagctgagatcgtgccactgcactccagcctgggcaacagagtgaaactgtcacacacacaaaaagaattcaggatagtgggccccaccctatggctcacacctgtaatctcagcactttgggaggctgagacaggaggatcgcttgaggccaggaattcaacatcagcctggataacagcaagaccctgtctgtctctacaaaaaatacaaaaattagctgggcttggtggtgagggcctgtagttccagctactcagaggctgagacaggagaattgcttgagcctaggaggtagaggcttcggtgagctatggttgcaccactgcactccagcctgggcaacagagcaagaccctgtttctaaaaagaaaagaaaagaggccgggcacggtggctcacgcctgtaatcccagcactttgggaggccgaggcaggcggatcacgaggtcaggagatcgagaccatcctggctaacatgatgaaaccccgtctctactaaataatacaaaaaacaattagccggacgtggtggccggcgcctgtagtcccagcttgtcgggaggctgaggcagaagaatggcgtgaacctgggaggcagagcttgcagtgagccgagatcgcaccactacactccagcctggctgacagagcgagactctgtctcaaaaaacaaaaaacaaaaaaaaaaagaaaagaaaagaaaaatcaggccgggcctggtggctcacacctgtaatcccagtgctttgggaggccgaggcgggcggatcatctaaggttgggagtttgagaccagcctgaccagcatggtgaaaccccatctgtactaaaaatacaaaaattagctgggcatggtggtgcatgcctgtaatcccaactactcaggaggctgaggcaggagaatcgctagaacccgggaggcagaggttgcggtgagcccagatcgtgccattgcactccagcctgggcaacaagagcaaaactccatctcaaaaaaaaaaaaaaaaaaaaaaaaaaatcagtggagtggctgtgggtggggaatggatgaagggacattgatttctgggccgtctgaatggaagtgttccttactttgatggggtggggacacggggtcgtgcatgcaaataatatgtgcaggcttgggacttcaccgcatgtaaattaactctcaataaagttccaggaaaagtaattccaattccagcaaccggattttgggctcagttcggaggctagcctgcaagccttgctggtgggtggcctgtaggggtgacaggaaaccccccgggcctccgctctttaggggagggggagcctcgcccttgcccccctccgggacgagcgggcagatctaaaagcttccctaccgccgcccaggcggtcgatagcagactcccaggctccgtttctgcctgcccggcagcccgggcccttcccgccagcccagcccctgggaggggacccgagccgggcggagcctcctccggagccgcacgccgggctcggctcaccctccccggatgccgctcctcctccatccccagaagtttcagccactgagattccccttgtcccggaggctggaggggaagacccaggcggctgcgctttggaggctggaccatcgtggggcttgtctgtgcccacttttcccccattcaagagttaccactgccaggcgcagttgctcaggcctgcaaacccagcactttgggatggcaagacaggaggatcgcttgagcccaggagcttgagaacagcctggacaacatggtaagaccgcatcactatattaaaaaaaaaaaaaaaaaaaaaaaaaaaaaaaaaaggctgggcgcggtggctcacgcctgtaatcccagcactttgggaggccaagaccggcagatcacaaggtcaggagattgagaccatcctggctaacacggtgaaaacccgtctctactaaaaatacaaaaaattagccaggcgtggtggcgggcgcctgtagtcccagctactcaggaggctgaggcaggagaatggcgtcaacccaggaggcggagcttgcagtgagccgagatcgcgccactgcactccaacctgggcgacagagcaagactccgtctcaaaaaaaaaaaaaaaaaaaaaaaaagaggctaggtgcggtgactcacgcctgtaaccccaggagtttgtgaccagcccggccaacatggtgaaaccccgtctctactaaacacacacacacacacacacacacacacacacacactcttagccgggtgtggtggcgggcgcctgtaatcccagccactcgggaggctgaggcaggagaattgcttgaacctgggaggcggagcttgcagtgagccaagatcgtgccattgcactccagcctgggctacaaaagcgaaactccgtctcaaaaaaaaaaaaaaaaaaaaaaaattcaagcctagtggattggaaataccactttccctgtcttccttcatcctttccttagtcactatctagacaccctttttactgggagtctgggttacagggttacattaaccagaaccttaaagagaaaaatactgtaattgcaaaaacgaccagccttttaaaatggaacaaaagagactagaaaatatcagaacccactgcacagtagaaatatgactatgacttcctgaaacttttgttttagttccaaacctgggtagaaggcctacgttgcaatgtaaaaaattaattctttgatttgtgatcaaagtgcttgaaagatgtggttatatatgatgtttgaaattggttttcttttttttttaattaatatatcacagaggtcacgctgtgtcaatgaatataagttttagcacttgaattttcttttcttttttttgagactgagccaccttatcacccaggctggagtgcagtggcgagatctcggctcactgcaactttcacctcctgggttcaagcgattctcctgcctcacctcccaagtagctgggattacaggcacccaccaacacatccagctaatttttgtattattagtagagacagggtttcaccaagttggccaggctggtctcgaactcgtgacctcaagtgatccgcccacctcagcctcccaaagtgctgagattacaggtgtcagccaccacacccagcttttaatttccttttctttgttgagacaggttctcattctgtcacccaggttggagtgcagtggtgcgatatgcgctcactgcagcctccacctccttgggctcaagcaatcctcccccctcagcctcccaagtagctggaagtacagacatgtgccaccatgcctggctaattttttagtttttgtagagttgggatctggctatgttgcccaggctagtcttgaactcctgggctcaggcgatcctcccacctgggcctcccaaagtgctgggattacaggcatgagccaccatgcccagcccactttcattttctactatgcatgtagccaatccccagagcccaggtacctccattgtttccagcctcttttaaagcttttcttaatgatggtaacagcaagcatcctctatgtgcctggcagaaggctaagcatttcacacactttgcctcatggagtcctcatgagaggcccattttactgatgagaaaatctgggaaccgtaacaataaaccatatgacttaggtcacacagcttgaaggtggtgaagccagaattcgaaccctggctgtctgattccagagctcttaaccaccctgtgttagttattcttttcttttcttttctttttttgagacgaagtcttgctcttgtcccccaggctggagtgcaatggtacaatatcggctcactgcaacctctgcctcccaggttcaagcaattctcctgcctcagcctcccgagtagctgggattacaggcgcctgccaccacgcccggctgatttttgtatttttagtagagacggcgtttcaccatgttggccaacctggtctcgaactcctgacctcaggtgatctgcccgcctcagcctcccaaagtgctgggattacaggcgtgagccaccgtgcccagcctattctttatagttctccacctatttgactgattatatccctgacataaattcctagaggtggatttgctgggtcagagaatccacatgcttaaaggtttaatactaatatctagaacaccatcccaagaaagttgtatcgtggccgggtgcggtggctgacatctgtaatcctagcactttgggtggccgaggagggaggatcacttgagatcaggagtttgagaccagcctgggcaagtcgtgagaccccatgttacaaaaagtttttaaaaaattagctgggtgtggtgacctgtacctgtagtcagctatttggcaggctgaggtgggaggattccttaagcctaggaggttgaggctgcagtgagccgtgattgtgccactgcactccagcatgggtgacatagtgagaccctgtctcaaaaaattaaaaaaaaaaaagttgtgtcaatttaaactcccatgaccgtgctcaagtgtgcattcccaaaacttcacacacactcataagcttgacaaggaaaagtgattcttcagctgaacggtcagattgagcatctttacagaggtttgttaagctctcactcctttgtgaaccccctattcaagccctgtgccaatttcacatttgggatgtttgtcttttttttcttattgattcatatgtgctttttgtatattaaggctcttaatgatttgtctgccatatacgtggcaaacaatctaatctcccttgatcttttcttttccttttttttcttgagatagagcctcactccgttgcccaggctggaatgcagtggcaccataatagctcaccgcaatcactgcagcatcaacctcctgggctcaagccatcctcctgcctcagcctcctgagtagctgggaccacaggtgtgtgccaccatgcccagataaatttttaaaaattatttttgtagggatggggtctcactatgttgcccaggctggctatctcctctgatctgggactccagctagatctccttttattgcccaactggcctcaatgaacatttctcttctgtctaggcctcattgcaggttgcattttattggcggttcctccagaaacaaaagcagagactttgagatcttatgaacctcagtcttacccagaacacttgaagaacccttcagctttccatggcaagaaagctcaggccctggggccagaagccacggctttgtgtctgggttctgtagtttactgctatggctccagtttctgattcctccaagttaagatgggttggtaaattctgccacgcagaatgcgcttctagccacgcccactgtgtatcaaaccatgcccactgtacataaaccacgccctctcatctagctacgcccaccaatcgtctagccacgcccaccttcgagtggagaggtgtgattagagcattaaagagagaggcgtgattagagcattaaaaagaagtgaagaaccgaaatagtgaggatcctgggccagggggaggaggagggagaagatcccctggcctcgatggctggcaattccttcatgcccctagcacccacctggttaaagaaaggatagctgggcgcaatgactcactcctgtaatcccagcactttgggaggccgaggcaggcaaatcttgaacttgaggccaggagttcaagaccagcctgatcaacatggcaaaaccccatctctactaaaaatacaaaaatcagccggtgtggtcgtgtatgcctgtaatcccagctactcaagaggctgaggcacgagaatcgcttgaactcagcaggcgaaggttgcagtgagccgagatcacaccacttcactccagcctgggcaacaaagcaagactgtctcaaaaaaaaaaaaaaaaaaagaaaagaaaagaaaagaaaaaagaaaaagaaaataaaaaaaagaaagaaggaggcacctggctactgtattccacctttctcctcacccactcttttttttttttttttttttgagacggagtccttctctgtcatccaggctggagtacagtggcaccatctcggctcactgcaacctccgcctcctgagttcaagctattctcctgcctcagcctcccaagtagctgggactacaaacacgcaccactacctccggctaatttttgtatttttagtagagatggggttttgccatgtttttcaggctagtcttgaactcctgacctcaagtggtccgcccgcctcagcctcccaaagtgctgggattacaggtgtgagccaccacgcccggccctcacccgctctttaaaatatccctaccagggtcaatggtttatctgtgcctcagtgttcccatctgtaaaatgaggataattttaaggattacctgagttagcatctgtgaaggggttagaatggtacctggcacatagtaggcactcaataaatggcatcactgatatggttccacggatggttgtattattaataggaataaagtgtgggatggaaaaacgttgctctgggcacctggaaccagccccaggggcacgtggggctctacacaggctctttaccccatgccagcgggaggacactttggggggaaactgaggcactgacaatcccctgccttcccagccctgagtccttctcacccatgcccagagcctcagaggccagcaaggtgccccaagggaaagcgacacttctgaactgcgctgcctggcacaattaccgttttcatcctcattaaactacattttcattctaattagagtttcaccgcctcccagagagaagggccgattacttttcagcatcattaacactggctccctccccactttcctcctcccctgcccaggctcccactacaccagggcattctctctctctctctccttcaccccatggaccagagagaagcaacagaacatttattgtcgcctactgggtgccaagttggatgctaggaaccttcccccacagcctcttcgccttatcttgggctggtctaattttctttttgtccccaacacttacccctttttgtttttgttttgttttgttttgttttgttttgttgagacagggtcttactctgtcgcccaggctggggtgcaggtgcgtgatctcggctcactgcaacctccgcctcccggattcaatcgattctcccacctcagcctcctgagtagctgggattacaggtgcacaccaccacctggctaatttttgtatttttttttagtagagagggagtttcaccaggttggccaggctggtctcaaactcctgatcccaagtgatccgcctgtcttggcctcccaaattgctgggattacaggtgtgagccactgcgcccggccccttttgaacatgctctatgctttatttgttctttttatcctctgtctccccctccccagaatgtcaacacccactcatgtcccccacgcactcctgggcacgctgaccccacagcttctaagaaccagctcccgagaagtggctctggctgctgagtgggtggaaagtatggagaacaaacactctcctggagcagaccttgagcaatggctgatgggagttggtggataaatatcccagctccctcgcccctaggtgggcaccctctgaagagtgtgctctatttgatttcagcattctccagcataattgagttgcccacagtggaaactggctcataaacacccttcattggctacctgcccttcccttcctcactctccttctcccctacccatgcttactgagatcatctctcagatcaaccatatcctagatctcccagcccctttggagttcaggcaaaccagagagggactcaatacccaaggaacaggttaagaaagcctctgcaaagccaggcacggtggctcatgcccgtaatccagtgctttgtgaggcagaggcaggaggatcatttgaggccaggagttcaagaccagcctggccaacatggtgaaacctcatctctactaaaaatacaaaaattagctgggcatggtggctcatgcctgtagtcccaactagttgggaagctgaggcaggagaatcaattgaacccaggaagcagaggctgcagtgagccgagatcatgtcactgcactccagtctgggcaacaaagcgagactccatgtcaaaaaaaaagaaaaaaaaaaaaagaccagcctgggcatcatagtgagatcccatctctaaaaaaaagaattggccgggtgtggtggctcacgcctgtaatcccagcactttgggaggccgaggtgggtggatcacaggagattgagaccatcctggctaacatggtaaaaccccgtctctattaaaaatacaaaacaaaattagcagggtgtggtggcgggcgcctgtagtctcagctactcgggaggccgaggcaggagaatggcacaaacctgggaggcggagcttgcagcgagccgagattgtgccactgcactccagcctgggcgacagagcgaggcttcgtctcaacaacaacaacaaaagaattagctgagcatggtagtgcatgcctataggcccagctatttgggaggctgagatgggaggatcacttgagcccaggagtttgaggctgcagtgagctatgatcgcaccactgcactccaacctgagtgacagagagagaccccatcttttaaaaaataaaataaaacaaaataaagaaagcctccgcacctctctcactctggacaaaaccactattatgaccagaatgcagcatcactgggcagctatgacctatatttgaaatacattcttagaaaggttccatttggaagggagtgcaacgtgcacagcacttttggggagcaacttggcagagtgcattaaaacatgaagtgcaggccgagtgcaatggctcatgtctgtaatcccagcactttgggaggctgaggcaggtggatcacttgaggtcaggagtttgaagccagcctggccaacatggcaaaaccctgtctctactaaaaatacaaaaattagccgggcttggtggtatgcgcttgtagtcccagctactcaggaggctgagacaggagaatcgcttgaacccgggaggcagaggttgcagtgagccaggatcgcaccactgcactccagcctgggcgacagtgtgagactccgtcccaaaaattaaaaaaaaaagtgaagtgcagccaggtacagtagttcacgcatgtaatcccagcactttgggaggccaaagtgggaggatcgcttgagcccaggggttcaagaccagcctgggcaacatagcaaaaccccgtctctgcaaaacaatatacaaaattagccaagcatggtggtgctcacctgtagtcttagctacttgggagactgaggtgggaggatcccctgagccctggatattgaggctgcagtgagctatgattgcaccactgcactccagcctggacaacagagcaagaccctgtctaaaaaaaaaaaaaaattaaataaataaataaagacaccagccatattggatttagagcccaccctaatccaatgtgacctcacattaacttaactgattatatctgcaaagaccctgtttccaaataattcattcaggagaacccagggttacgacttcatttttttttttttttgagacactctcgctctgtcgcccaggctggagtgcagtgacgtgatctccactcactgcaacctctgcctcctgcatgccaccatgcccagctaatttttgtatttttggtagagacagagtttcaccatgttgcctaggctggtctcaaactcttgacctcaagcaatccacccacctcagcctcccaaaatgctgggattacaggcatgagccactacactcagccttctgttttttgttgtttgtttgtttgtttgtttttaatagagatagggtcttgctgtgtttttaatagagatagggttgcccagaccaacctcaaactcctggcctcaagcaatcctcctgccttagcctctcaaaattcaaattatagcctgggaacaggcatgagccaccgcacctgaatcaacatatctttttttttttttccgagacacggtctcgctctgtcacccgggctggagtgaaatggtgcgatctcggctcactgtaacttctgcctcccgggttcaagcgattctcctgcctcagcctcctgagtagctgggcctacaggcaagtgccaccacgcccgggtaatttttgtatttttagtagagacggggttttgccatgttggccaggctggtctccaactcctgacctctggtgatctgccggccttggcctcccaaagtgctgggattacaggtatgagccaccgtgcccggtcgatagccccattttacagacagaaaactgatacccaggtacatggattccctgtgagcagatcacaccgctggtaagaggcagagctggtctcagtggctgctgagcccttacgtgtatatgacatgaaacgcacatggtcatttatgtattccaacaaccttgcaaggcagaaaataccttcatgttatagatgaggaaacggaggcaaggagcgagtaagcaacttgcctgaggtcaggtgggtgccagagcagggacttgagcctcggtagctgaccatgggaccctctgggggaccacgggctccatctcctgggcgttggagtgagggtctctttcagcacaaatgttccatagccatagggagaaacagggactgcagcctagtcccccaggactgggccagggagaagccctgactggttaagaccttccaggtaggctgggcgtggtggctcacacctgtaatcccagcactttgagaggccaaggcaggcagatcacgaggtcaggagttcgagaccggcctgggcaacatggcgagactgcatctcaaaaaaacgacaaaagacgtttcaggtggcgctacccataggccctgctcttggtccaggcagcaactgccacgctctggggaccccagtcagcttctaggtatttcagagcctgaggatctaccagagccgctctcaccgcacagggggtttttaatgaatgctaattaatatctgtgttcacagagccagccaggcccctgggcctggagcatccacaggaggaaagtacaagaaccctggcaccctgccaagcagcagggattcttcagacacccaagggctggtttgctgggaaggactcatgtgaccagaaggggaaactgaggcactgctgagcaccaacagtcctggagagctttaagaatggttgccatctgaggccaggcatggtggtttatgcctgtaatcccagcactttgggaggccaaggcaggcaaatcacttgaggtcaggagttcgaggctgtcaggcctctgagcccaagctaagccatcatatcccctgtgacctgcatatacatccagatggcctgaagcaactgaagatccacaaaagaagtgaaaatagccagttcctccttaactgatgacatcccaccatcgtgatttgttcctgcccaaccctaactgttcaactgactttgtgacaatataccctccccgcccttgcaataatgtactttgtgatattcccccgcccttatgaatgtactttgtaggatacaccctccccacccttgagaaggtagattgtaatattctccccacccaacttgagaatgtactttgtatgatccaccccctgcctgcaaaaaaattgctcctggctgggcgcggtggctcatgcctgtaatcccagcactttgcgaggccgaggtgggtggaccacgaggtcaggagatcgagaccatcctggctaacatggtgaaaccctgtctctactaaaaatacaaaaaattaaccaggcatggtggtgggcgcctgtagtcccagctacttgggaggctgagccaggagaatggcgtgaacctgggagatggagcttgcagtgagccaagattgcgccactgcactccagcctgggcgacagagcgagactcagtctcagaaaaaaaaaaattgcacctaactccaccacctatcccaaacctataagaactaatgataatcccatcaccctttgctgactctcttttcggactcagccctgcctgcacccaaaaaaaagctttattgctcacgcaaagcctgtttggtggacccttttcacacggatgcacgtgacagagaccagcctggtcatcatggtgaaaccctgtgtctaccaaaaatacaaagattagccaggcatggtggtgcacacctctaatcccagctacttgggaggctgaggcaggagaatctcttgaacccatgagacgggaggcagaggttgcagtgagctgagattgtgccactgcactccagcctgggcaacagagtgataccctgccctgtccccttcccaccacaaacacacaagaatggttgccatttgaaaggaacaaagaaatgggtattggagaccccagagccatcagcttccacaagagctctggacctcaccccagcctcagcttcctcatcagtaaatgggaacatgaattcctttccttatatgtagtaggcataagaactcattaagcatttatgcatgtgaaatgctttgcagataatcagtttccaataggtgttaactccctttccctgactgtgcctcagttttcctcttgggcatacaagaagctggcagggctttgaggctaccctctgggagagctttgggcatggtgccttgactcagacctcggagcaagtacgaaaaatcacttccgatcggcctcattaataacacagttgctaatgtggcagtaagacagttccctggcccctgattaaaaacagaagtttcccccacattcgtggagatggagcagaagggaaaacaaagacaagcacacttgtgccagataaatacagacgcaaacacatgcatggcagataaacacacactggcacaccaaatatacacacagccggctgcagacatccgggtgggctcgcacagcccgaagagaccaaaagcccgggtgggctcgcacaaaaaggaacagaaaccgctgcagagatgtcccgctggaccctggccacatctgggacctgatcacttcagtgtacttgaacaggagacagagtgtgggaaattgacatccctgggagtagccctgagccagaaatggaatgagttggtggataaataccccagctccctccccagcatatgcctaatccacagtctcccagagacccctggagggatcaggccccagttttccgtagtgacaacctgtttgatatcccttgtcatctctcttctcccctccccaggtttcctgtgttcatttcccaaataaaccacttgccctccaaccctctatcagggtctgtttctgacctgtatgtgtacctcccagaagtatacacagcaatgggtctcaatgagggtaactctgtcacccaggagacatttggcaatgtctgaaggtatttctggctgtaaaattggggcagggggccagacacagtgacttacacttgtaaccccagcactttgggagaccaaagtgggcggatcacttgaggtgaggagttcaagaccagcgtggccaatatggggaaaactccatctctactaaaaatacaaaaattagccaggtgtggtggttagtgcctgtaatcccagctactcgagaggctgaggtgggggaatcacttgaacctgggaggcagaggttgcagtgagccaagatcattccacctcactccagcctgggcgacagagtgagactccatctcaaaaaaaaaaaaaaaaaaaaaaaatgggggcaggggtactcctggcatttagtgggtccagttcagggacgctcaatgtcctacaagggactgggcaaggtggctaaggcctgtgatcccagcacttcgggaagtcaaggcacgaggatcacttgaggccatgagtccaaggccagcctgggcaacatagcaagacctcatctcccctgcaaaaaaaaaaaaatcctacaaggcacagaacagttccccagagcaaaaaatgatgtggccccaaatgtcaagagtgctgacattgagaaaccctggtctacgggaagccactgggccccacgtggaaacagctcagtgcacgcacattattcaaatgcagacacagtgggtgcaccggcagcattagaccacacatacccactgtgcaccaagtccttgaactaaggaaacagcaggatcatccacacctggtgtgttttcctaccaagatgtataaaccagcagaggagacccccaattccacccagatgtggggccctgcccagaccagctttttgtgcaactcacagacaccctggaaagtggttcaatgaccattaaaaccattttagagacgaggcaactgaggcccagacagggtaagtgttttgttgttgtgtttttgtttttgttttttgagatggagtcttgctctgttgcccaggctggagtgcagtggcaccatctcagctcactgcaacctctgcctcctgggttcaaacgattctcatgcctcagtctcccaagtagctacaggcgcgtgccaccacacccagctaatttttgtatttttagtagagacagggtcactccatgttgaccaggctggtctcgaactcctgatcttaagtgatcctcccaccttgtcctcccaaagtgctgggattattggcatgagccactgtgcccagcccagacaggagaagtttatgacccagctagaaacccagagaccccttaggcatgtgtagacatgcttttgaaggcaaagagggtaggatgaaaggagaccctccccaccatcatctcggaattgagataaggagggacaggaagggctttagcttcccagagggaatcctgtatcactttgggtaactagaaaatctattgaaaaatgtttttaggctgggcgaggtagtgctcacctgaaatctcagcactgagggagcctgaagcaggaggatgtcttgagcccaagagttggagaccaacccgggcaacatggcaagacttctcgtctctgcaataaataaaatacaatttttgttgttgttgttgtttgtttgttcttttgagacgaagtttcgctctttttgcccaggctggagtgcaatggcgtgacctcagctcactgcaacctctgcctcccgggttcaaaggagtctcctgcctcagcctcccgagtaaccgggattacaggcgcatgccaccacgcccagctagttttgtatttttagtagagacggggtttcgccatgttggccaggctggtcttgaaatcctgacctccagtaattcacccgcctcagcctcccaaagtgctgggattataggcgtgagccatgacgcccagccaaatacaatgttttttaaacatacattgttttttaaacattggctgactcttggccaagcatcacgcctgtaatcccagcactttaggaagctgaggcgggcagatcacttgaggtcaggagtttcacaccagcctggtcaacgtggtgaaaccctgtctctactaaaaatacaaaaaattagctgggcgtggtggcgcgtgcctgtaatcccagctactcgggagtctgaggcaggagatggcttgaacccaggaggcagaggttgcactgagccaagatcctgccactgcactccagcctgagtgacagagcaaaaccgtgtctcaaacaaacaaacaaacaaaatgggctgactctggactcacacaggcctggtgtctccaatcccagccttgccattttctggctctatgaacctgggtgagccgcatcgcctccctgagcctcagtttccccatctgtaaaacggggattcacccattcaccattccacaaatgtgcacccaagacccactgacaccaagcgctgcgcccagctctaacctatataaagttaaggaagaacacgaacatggtaagtgcgtctccccctcccccaggcatggagctgctgaactagttttgggaatggaatcagagcacgcgtggacagatggagggagccctcagctgcccggactctgcagcccaccacccccactcttctcagatccccctcgtttgaccaaaaagcccctctaccacgaggtaggaccccaagcaggatcccagggactggcgtccaaatccgggccaggaactgaccccagcagccagacccgggacggggctaaagctcgggtttttccacctccgcttcccgccactgcagcgcggggagcgagcgccacctgtgggcctccaaggggaggtgcgtgcgactcccggggaggtggacggtcgcccccgtttctccccaacccgggggacctcgggccctccaggagtttcggaaacagctctcatctcttaaattctcctccacaacccacttttcccggctgccatttcccagctagaactcgtcgtccatgcattcatgcaacatttattgagcacctactgtgtgtattgagcaaacctagatcattgctctaggtttagagtacacagaagacagaatggggctggctcaggcctgtaaccccagccactcaggaggctgaggtgggaggatcacttgagcccagaagatggaggctgctgtgagtcatgatggcaccattgcactccagtctgagaaacacagcgataccctgtctctaaaagtaaaaagaggccaggtacagtggctcggccaggcacggtggctcacgcctgtaattccagcactttgggaggccaaggcgtgcggatcacgaggtcagcagttcgataccagcctgaccgacatggtgaaaccccctctctactaaaaatacaaaaattagccaggcgtggtggcgggcgcctgtaatcccagctactcaggaggctgaggcaggagaattacttgaacccaggagacggaggttgcagtgagcagagatcgtgtcactgcactccagcctgggcgacagagcaagactccatctcaaaaaaaagaaaaaaaatggaaacaaaacagataaacctccatgcccttctggagcttacagtccaagggaagagagaagagaggaggaagaggacaacaggctgcaagatcattgctgatggcagtaagtgcagtaagtgttctgaaggagaaagtatatacagggatgtcactgaagcacctgctgtgggtagagtgggtggagtgggctctgaggaagtgacgcttatcctgaggcctgagaagaataaagccccagccatgccgagtctggagccaggatttccagtagaaggcgcagccagcgcaaaggccctgtggcagaaaggagctcgggtgttgaacagtgggaaaggaggtcacagtagccagagccgagagatgaagaaacaggtgggctgcgatgtcaaggcctattttggagacaaatctgatctctcactccccctgaggagtcacctcctaaaagcccgaggggagaagaaggctcacactgagctaaaagccctccaacaccaccagctgcacccttctcgtcgcccacccacagatatggtgtcgcccacagaaagaagccctggcccatgcactgtccccctacccaccccaccactctcccaggactttgcctctgaccatattgaccccaattatgcagttaaggtgcacgtggtcggctctgcttgcaaagtccccttcttaccccctgcccatctccctgggagacacagggaaccatgcaatgtgccttccaagaccaatgcttggccaggcgcggtggctcatgcctgtaatcccagcactttgggaggccgaggtgggcggattgcctgaggtcaggagtttgagactagcctggccaatatggtgaaaccccgtctctactaaaaatacaaaaattaaccgggcgttgtggcaggcacctgtaattccagctactcgggaggctgaggcaggagaatcacttgaacttggggggcagaggttgcagtgagctgagattgtgccactgcactccagcctgggtgaaagagtgagactccgcctcaaaaaaaaaaaaaaaaagttgccagccccacacacggacctcagcccggcctgccccctttgccttcatactcccgagagcagtctccccatgtggcctgacaaccccaaaagggactatgcagggaggagatctggtttcatgaacattgctcttgggatccctgcctgggggtggccacgagagaggctgtgggtcttgcgcagccacagaaggggagcagagccctgtccccgactccccgccagtgcagaaggggtacaccctctctccacagcctggcctcagttctggggactgcctggctattggggagagggcagagcctcttggagcttgtaattaaggcttcagaggcaccgacttaattactaccttgtgaagggttaattacccctaattgttcaggaatcaggcaatttttgtgccttcagagaatcaaaatattttcccttccagaagtgcctcctcccttttgctttttctaatttccctgcaaggaggggcacgatgggctgggtggggtccggaggatcggaaaccaccagtctcccctcagagaacacacttgccgggcctgccgcaagcaagagcgggattcagaggagagaggttcccagccagctcaaggcaggaagacttcctggaagaggtggccatgggttggtcttaaggaccccaagtcaacctcccaggtaagccaagggctcctagaattctgtgccacctagagggtagcagggcctggggaagctggagctgatggtttcaggcatgggaatgctgcctggagtctcagtttcctcacttgttaaatggggccagggctgcgatgagccaggcagagtgagcagggaataaaggctgccctcggagatgaaatcctggtgggcaccgagaagacatcactcatctgcagctcatctagcttgttgctcctctgcctgggtttgtagtaatgtaagaattagggcccacccacttcccagccctcatctccctgccttcctcctaacccccttgatgggctttgaacacaccgcactggttcccaactcagaacttttgtccctggtgttccccctgcctggcttactttcccccctgatggtgctgtgtctgagaagcttttgtcctgaaatgtcacctcctccagggagccttccctgaccaccctctctcccctgaaccactccttcctgggaattctccagcttatcacacttcttcttttttttttttttttttttcaggtggagtctcgctctgtcgcccaggctggagtgcagtggcgtgatctctgctcactgcaagcccctcctcccaggttcacaccattctcctgcctcagcctcctgagtagctgggactacaggcacccgccaccacacccggctaattttttgtatttttagtagagacggggtttcaccgtattagccaggatggtctccatctcctgacctcgtgatccgcctgcctcggcctcccaaagtgctgggattacaggcgtgagccactgcgcccggccttctatctctcttttgctctctctctctctcttttttttttttttttgagatggagtctcactctgtcacccaggctggagtgcagtggcatgatctgggctcactgcaacctgtgcctcctgggttcaaatgattctcaggcctcagcctcccgagtagctgggattacaggcgcacaccaccacacctggctaattttttaatatttttagtggagatggggtttcaccatgttggccaggctggtctcgaactcttgacctcaagtgatctgcccacctcggcctcccaaagtgctgggattacaggcatgagccgctgtgcccggcccttgctctctgtttttacagagacagggtctcactctgttgcccgggctggagtgcagtggtatgctcatagctcactacagccttgaactcctggcctcaagcgatcctccaaagtagctgggactataagcacgcaccaccacatctagataatttaaaaatagttttttgcagcgatggggtcttgttatgttacccagactggtctcaaacttacggcctcaagagatccttctgcctctgcctcccaaagtgctgggattacaggcatgagccactgcccctggccacacttttacctctcttatgtaaattgccttgtttagatcctggctgggtgactcagggcccagtatcctcatctgtgaaatgggggtgatgacaacagcctcctcagagttccagacctgactgtggtggccgtgggggtccggtgggttgagaccttcttctatggccaaggagtggacttgggggagcagggcaagtgagccaggagcaggggccagagggccggagcagggcaagtgagcaaggctcaagtgatgggtcagtcagaaggggttagaggactgacatggtgtctcacgcctgtaatcccagcactttgggaggctaaggcgggcagatcacttgacatcaggagttcgagaccagcccgggcaacatggtgaaagcccgtatctactaaaaatatgaaaattagaggccgggcgcggtggctcatgcctgtaatcctagcactgcgggaggccgaggtgggtggatcaggaggtcaggagtttgagaccatcccagccaatgtggtgaaactctgtctctactaaaaatacaaaaattagctgggcatggtggcatgcgcctgtagtcccagctactcaggaggctgaggcaggagaatcgcttgaacccgggaggcagaggttgcagtgagcctagattatgccactggactccagcctggactccactggcagcctcacagagggagactccatctcaaaaaaaaaaaaaaaagaaagaaagaaagaaaaaaagaaattagctgggcatggtggcgggcacctatagtcccagctactcaggaggctgagacacaagaatcacatgaacccaggaggtggagattgcagtgagcaaagatcgcaccactgcactccagcctgggtgacagagcgagactctgtttcaaaaaaaaaaaaaaaaaaaaagggcgtggttagagaggaggcagacttgggaacaatgggtatactgttatgacctcattttatagatggggaaagtgaggccccagaaaggtgaagtcacttagcgagggcacgcagccctctagtgggggagccataattcattcccatactgggcagagtcccccacacagagtgggggaggggatggcaggggaaggcggaggagggaatgatgggtggagagctgtttggcagaaaggtgaaatacggttttgattcagctgtgttggaggacatagtgactctgccaagatatagtagagattaaattaggcgcgctggcttacgcctgcaatgtcagcatttttggaggctaaggtgggccgatcacttgaggtcaggagtttgagaccagcctggccaacatggctaaactccgtccctactaaaaatacaaaaattagccaggcatggtggcaggtgcctgtaatcccagctactcgggaggctcaggcaggagaattgcttgaactgggaggcagaggttgcagtgggccaagatcatgccactgcactccagcctggaccagagttggtcctgaaaaaaaaaaaaaaaaaagagagagaaaggaggaaggagggagggagagaagaaagaagagagtgagcaagggagggagggagaggtggttgattggggaagactattctagttgcaagtaaaaaatccaaacccaaactggcttaaagaaaaaataatgataatttattggtttgtgtcattgaaaagtttaagatatgttggcttcagggacagctggattcacgggctcaaacaaagtaatctggctgggtgtggtggctcatgcctgtaatcccagcagtttgggaggccaaggcaggaggcttgcttgagcccaggagtttgagaccagcccgggcaacatagtgaaacctcatctctataaaaaaaaattaaaaaataaggagggaggatcactcgagcctgggaattgaggctgcagtggaaccatgatcgtgccactgcactcacacctgggtgacaaagtgaagccctgcttcaaaagaagaaaataataattcctgggctccctctgattggacagtttggggtcacatgtcatttaggaaccaatcacagtggctagaaaggatagaatgagtccatgagccactcctgttgatgagggtggggatggccctacagacctcagtagacaaagagtgtaggcaaaagtgacaatttattcaagaaacatttatttatttatttattttgatttatttatttttttgagacacagtctcgctctgttgcccaggctggagtgcactagcgcaatctcagctcactgcaacctccgcctcctgggttcacacaattctcctgcctcagcctccctagtagctgggattacaggcacgcgccaccacacccagctaatttttgtatttttagtagagacagggtttcaccgtgttggccaggctggtctcgaactcctgacctcaggtgatgtgcccgtcttggcctcccaaaagtgctgggattacagccctgagccactgcacctggctgagaaacattaattgagcacctgtggtgtccctggccctgttttaggtgctgaggatacagcagtgaacaagacagaaaaacccctgcccccatgggactgacactctatgtaaattcatgaattaaaatattagaaggtgatgtgctatagagaaaaataaaatagaggggaaaggttagaaaggactgggggaaggaagctaaaatttcaaatatgggggtcgtcagggaagtactcactgaggaggtgacctctgagcaagtatgttaggcagacaaaagagtgagaggggccaggcgcagtggctcatgcctgtaatcccagcactttgggaggccaaggcaggcagatcagttgaggtcaggagttcgagaccagcctggccaacatggtgaaaccccgtctctactaaaaatacaaaaattagccgggcgtggtgatgcccacttgtagtcccagcttttcgggaggctgaggcaggagaatggcttgaacccaggaggcagaggctgtggtgagctgaggttgcgccactgcactccagcctgggcaacagagcaagactctgtctcaaaaacacaaaataataaaaaaataaaaaaatatctgggggaaaggtgttccaggcagagggaacagcgcatgcaaaggctgtgaggctggactgggcctggcatatttatttggggaacagtgaggaagctggggtggctggagccaagtgaatgaggggaagagagctggaggtgacagggcaaatcacacagccaagccttgtgggccttggggaagactggattttactgggtgaggtgggagccatagaggcttcttggagagaggaagagcttggtctgaacggattcaggtgctcacaggaagaacagacggccagaccaacataacagctgtcacagatacaggaagagattttatatctccctgcggttggttttgttgccttttcacacgactcatggggcgaggcaccagtggggtgaggagctgggaggacaggccaccccagagttccccttcccaggagtcagggagcccccaccccaccatgtcccaggacacactcgggcagggctgccaggagtgtttgtgtttcaccctctctagatgggtggaaatgaggtgtggctggggaggtggtggggtggccaggagggaagctgggtcccggagaggcaggacccgtgaaggcatcggggaagggggtgccccctctgagaaggcacaggggtcttgctgtctcctttctctatttgagtatcaaaggcctgctcaagcccgaagctaaagggaaggtcaaggatgttgggggtgtcaggctgtgggtggctgggtttggtcacagctgcaattgtactgccgataaggaccctcgaggctgaatgtcagcccggccagggttgggcaacatcctgttggggaagtctcttctagttatggttttcgcttctccagccctgccctgaccctaatgggagaattacaggcaggggagcacacactgaacgcgcacgttaccagaaacagaaataactccctttaaattttcccaagaataggatatacacgtgtaaaaaaataataataataatttaaaacttagacccagctgggcatggtggctcatgcctgtaaacccagcactttgggaggctgaggtgggtggatcacctgaggtcagaagttcgagaccagcctggccaacatggtgaaacaccatctctactaaaaatacaaaaattagccaggcttggtggcacatgcctgtaatcccagctacttgggaggctgaggcaggagaatcacttgaacctgggaggcagaggttgcagtgagccaagactgagccactgcacttcactgtgcgtgatgggagcagagactccatctcaaaaaagaaaaaaaaattagccgggcgtggtggcaggtgcctgtaatcccagctacttgagaggctgagggagaatcacttgaaaccgggaggcagaggttgcagtgagcagaggtcacgtgccattgcactccagcctgggcaacaagagcgagactccgtctcaaaaaaaaaaaaaaaaaaaagaacttagaccctacctcataatcacacacaaaaagtaactaaatgactaaatgagactaggcgcagtagctcatgcctgtaatcccagcactttgggagactcaggtggagggatcatctgaggtcaggagtttgagaccagcctggccaacatggcaaaaccccgtctgtactaaaaatatttaaaaagtagccaggcgtggtggctcatgcctgtgatcccagctactctggaggctgaggcctgagaatcacctgaactggggaggcggaggttgcaatgagccgagattgcaccactgcactccagtctgggcgacagagcaagactccgtctcaggagacaaaaaaagaaaaagaaatctttgagaccatggattaggcaaaggtttcttacctatgtcaccaaaaccacaatccgtaaaagaaaaaaataatgagcgaattgaacttcatcacaatgaaaacttttgctcttcaaaagacataaagaaaataaaaagacaagccgccaactaggaggaaatattttcaaatcatttttctgaaagaatgtgtatccagaatatataaagaactcttaaaataaaaactctttatataagaatatatacggaactcaacaataagaaggaaaaaaaatcccagtttaaaaatgggcaaaagatttgaacagatgcttcgccaaagaggacatttcgatggtaaatatgcatatgaaaagatgcgcaacagcattagttgttacagaaatgcaaattaaaaccacaaggagataccacttcatacatctattagaagagctaagatttattttttatttttgagatggagtctcactctgtcacccaggctggagtgcagtggtgcaatcatagctcactgcagcctcgacttcctgggtcaagcgatcctcccactttagcctcccaagtcaccaggactacaagtggacaccgccacgcctggctaagttgtgttttggggtttcttttttttgagacagggtctatttctgtcgcacaggctggagtgcaatggtgccatcatagctcactgcagccttgaactcctgggctcaagcgatccttccacctcagcctcccaagtagctgggaaccacaggcatgcaccactctgcctgattaattttttgtttgtttgagacattctcgttctgttgcccagctggaattcagtggcacgatctcagctcactgtaacctccgcctcctgggttcaagtgatcctcctgcctcagcctacagagtagctgggattacaggcatgtaccaccacacccagctattttttttttttttttttttgtatttttaatagagactaggttttgccatgttggtcaggctggttgtgaactcctggccttaagtgatgcgcccatctcagcctcccaagatgctgagaatttttttgtattttttatagagacggagttttgccacgttgcctaagctggtctcaaacttctgagctcaagtgatcctcctccctcagccttccaaagtgttgggattacaggcatgagccactgtgcctggcctcaggtgaactctttttttttttttttttttgagacggagttttgctcttgttgcccaggctggagtggagtgcagtggcatgatctctgctcacggcaacctccgcctcccgggttcaagcgattctcctgcctcagcctcctgagtagctgggactacaggcgtgcaccaccacgcctggctaattttgtacttttagtagagacagggtttctccacgttggtcaggctggtcttgaactcccgacctcaggttatccgcccgccttggcctcccagagcattgggattacaggcatgagccaccgcacctggccccaagtaaactctttaaatcatcttttatgcttcagcttcttccttttttttttttttttttttttttttttgagacagagtctcactctgtcgcccaggctggagtgtggagtgcagtggtgcgatctcggctcactgcaacctccgcctcccgggttcacaccattctcctgcctcagcctcctgagtagctgggactacaggcgcccaccaccacgcccagctcattttttgtatttttagtagagacggggtttcacatgttagccaggatggtctcgatctcctgacctcgtgatccgcccgcctcggcctcccaaagtgctgggattacagggttgagccaccgcacccagcccagcctcttttatgttgacaaattcaagtgtccatcaacagatgaatggacaaacaactgtggtcctcccatgcaaggaaacactggttagcaatagaaagcaacaaactgttgataaacacagcaacatggataaacctcaaaaatatgccgagtggaagaagccagacccacaatattacatattgtacaattccatttatatgaaatttctagaaaaggcagagctctagagacagaaagcagattagtgattacctggagctgaggctgggagtgcggatggattgctaatgtggggatttggggggaaatcaaagtgttctcaaatgctgtattgtagtaatacttgcacagctaggtgagtttactaaaagtcatctaactgtaggtttgtaatgggcgaattataggctatataagttattcctcaataaggctataaaaatgttgccctaggccaggcgtggtggctcatgcctgtaatcccagcactttgggaggccgaggtgggcggatcacaaggtcaggagatcaagaccatcctggctaacacggcgaaaccccgtctctactaaaaatacaaaaaattagctgggcgtggtggcggtcgtctgtagtcccaggtacttgggaggctgaggcaggagaatgacaggaaccctggaggcagagcttgcagtgagctgagatcacgccactgcactccagcctgggtgacagagcaagaccccatctcaaaaaaaaaaaaaaatgttgccctaaaaattcggctatgggcttgtcaccatccgatctattgactcaacaagtccctacagtccccaacccttttctgagctctggaggcacagcaggaaataaaatagacaaatatcctggggctgacattctcagggggagacagagagggagcaagatcaagaactaaaatctagcagggtgggccgggcgcggtgctcacacctgtaatcccagcactttgggaggctgaggcaggcagatcacttgagctcagttcataaccagcctggccaacatggggaaaccccatctctactaaaaaaaaaacaaaaattagctgagcgtggtggcgcatgcctgtaatcccagctactcgggaggctgaggcaggagaattgcttgaacccgggaggcagaggttgcagtgagccaagattgtgccactgcacttgtctgggtgatagagtgagactccatctcaaaataaaaaaaaaaaaaaaaagaaagaaaaaaagtccagcagggtggtcaggcacggtgactcaggcctataatctcagcactttgggaagctgaggcaggaagatcgcttgagaccaggagtttgtgaccagtctgggcaacatagcaagacccctatctctacaaaaaataaaataaacaaaattagtcaagtgtggtggtgcacacttgtagtcccagctactcaggaggctgaggcagaaggatcacttgaacccaggaggttgaggctgcagtgagctgagattgcaccactgcactccagcctgggtaacagagtgaaaccctgtctcaaaatgttcagcactgtcctggtctgtagatagaaaccaaaacaaacaaataaatttatgtattcatttaattaaataaaccaaattagcctggcatggtagtgcagacctgtagtcccagctactcaggagggtgaggcaggaggattgcttgagcccaggagctggaggctgcagtgagctatgatcgcaccactgcaccccagcctgagcgacagagcaagaccctgtttcaaaataaaaagaaaaaagagaaataaagaactaatatatacatctctttaaaagcaaacgaacaaaagacttgggccaagcatggtggctcacacctgtaatcccaggactttgggaggccaaggcgtgcagatcatctgaggtcaggagtttgagaccagcctggccaacgtggtgaaaccttgtctccactaaaaatacaaaaattacaaccgggcgcggtggctcacgcctgtaatcccagcactttgggaggccgaggcaggcggatcacgaggtcaggagatcgagaccatcctggctaacacgatgaaaccctgtctctactaaaaatacaaaaaatgagctgggcgtggtggcgggtgcctgtagtcccagctactagggaggctgaggcaggagagtggcgtgaacctgggaggcgaagcttgcagtgagccgagatcgcaccactgcactctggcctgggcaacagagcaagactctgtctcaaaaaaaaaaaaaaatacaaaaattacctgagtgtggtggtgcgtgcctgtaatcccagctactcaggaggctgaggcaggagaatcacttgaacccgagaggcggaggctgcagccagctgagattgtgccactgcactccagcctgggtgacagaatgagactctgtctcaaaaaaaaaaaaaaaaagacctgaagggggcgagagaaagccatgtggggatctggaggaggaggtggtgctgcaagtgagagtgagctgccgtgcaaagcccctaaggtaggagcatgcccaaaacggcgaggaagctggcctggctgaagggaatgagcaaaggggagagaaggaggaggtgagggcagataagtgctgagcagatcctgcagggccctgtgggccacaagaaggaatttggcttttgcactgagtgaggtgggagccctggagggtccttgagcagaggagggacgtgccctgacagaaaagcatggagcgggcgagcaagggcaggagccaggagaccagggcagaggagtctgcactgggccaagggggagttgatggggccggaccaggtaggggctgtggaggaggtgaaaagtgagtagatgctggatagattttgaaaatagagctctcgggatttgctgatacaatagagagagagagaaagggacaggggcagagatagaggccaggcatggtggctcatgcctgtaatcccagtactttgtggggcagaggcaggagggtcactgaagcctaggagttcaagaccagcctgggcaacaaagtgagaccggggaaggagaaggaaggaaggaaggaagggagggagggagggagggagggagggagggagggagggaggggaggaaggagaaagaaagggaggagagatagagatagaggaaagaaagaaagaaggaaggagaagaaagagggaaggaaggaaggaaggaaggaagaaatggagggagggagggaaggaaggaaggagaaagaaagggaggagagacagagatagatgaaagaaagaaggaaggagaagaaagaaagagagggaaggaaggaaggaaggaaggaaggagagacagagaacgaagaaagagaagaaagaaggaaacagaaagagagaacaaaataaaacagagacagagacatggaggactccaagtattttgccccaagaatctgggccaaaagaaaggaaacaaggtggccgggcgcggtggctcccgcctgtaatcccagcactttgggaggccgaggcgggcggatcacgaggtcaggagattgagaccatcctggctaacacggtgaaaccccgtctctactaaaaatacaaaaaattagccgggcgtggtggggggcgcctgtagccccagctactcgggaggctgaggcaggagaatggcgtgaacctgggaggcagagcttgcagtgagccgagatcgcgccactgcactccagcctgggtgacagagcaagactccgtctcaaaaaaaaaagaaaaaagaaaaaaaaggaaggaacaaggctcagagaggtccaaggagttgccctggcggtccggggccacagtggccttcatccccagctgagatgtgtccccagtctaaggccactcagagccaggcaccttctccggctgcctcccaatccccgccccccgcttccgtcccagcaccctcaccccgcccccgggcccctttgtcctcctcttcgtcttatttccagaatttctcctccctagggaatccagtccatgtgcttttgattcctttgtcctgaactcatgcggcatgagcacccctgaagccttatgtggaaaaatttggaggctgggggtggggagggggtcacattcctcccgggggtacagagctacgtcggcatctccagggccccccagcagcaagcaggcatcctcccaggccaggccagaccggacgctgcccaacacaggctttctttggggcttggccggcgcccgactacagccccggctccagctgccctgcctgtcccccgcccccacgcctcccgtcccaacctcccacacgtttcctcctagaagcccagacccgtgggacttggcctcccccgcgccttccctctctactcagctctgcagctcctgtaggcctcctccccgggtgatcacagaaggaccagctcaccttagcgggacaggcagggcatgggcgtggccagagcctcgggcaggcatcccaggctccctggtgtctctctcatccgctggcctctgtgccctcttctcttccccacccccgctcgtggcccctcctgcctctccatcgcaaagtccccagaggagtctccttaatcacttgcttttgactgaatcctgaccacctggaccctgatctagctactgaggagataaagtaaccaacacttaaaagctaaccttcaggcattctgggaggctgagactgacggatcacttgaggtcaggagttcaagaccagcctggccaacaagatgaaacctcgtctctactaaaaatacaaaaaaattagctggcgtagtggcggatgcctgtaatcccagctactgcggaggctgaggcaggagaatcgcttgaacttgggaggtggagattgcagtgagctgagatcgtgccactgcactccagcctgggcaacaaagcaagactccgtctcaaaaaataaaaattagctgggtgtggggccgggcttggtggctcaagcctgtaatcccagcactttgggaggccgaggcaggcggatcacctgaggtcagaagttcaagaccagcctggccaacatggtgaaaccccgtctctactaaaaatacaaaaaaaaattagccaggcgtggtggcgcatgcctgtaattccagctactcgggaggctgaggcaggagaatcagttgaacctgggaggcagacgttgcagtgagccgagatcatgccactgcactccagcctgggtgacagagcgacaccctgtcttaaaagaaaaaaaatagctggctgtggtggcatgtgactgtagtcccagccacaagggaggctgaggtgggaggattgcttgagcccgggagttcaaggctgcagtaagctatgactgcactgctgcactccaccctggctgagaccttgactcagcaacaatgaaaaagtgacagggccaggacttgacccctgaccattttgttctacagcctttcatgggaaagacagatgagttttcgaccttccagagcctttgatccagaggagagaggcaggaaatagcaaatggataagaatatgccattcggtgactagggcaatggagattgcaaaagatggtggctgggaaatggggcttgtgtcgggggtccctgagaccaccctcagggtcaataatttgctgagattgatagatcccagaaaagtggtgttactcccagttatggtttattacagtgaaagttacagatgaaaatcagcaaagaggccaggcttggtggctcatgcctgtaaccccagcactttgggaggcccagacaggcagatcatttgaggtcatgagttcaagaccagcctgaccaacatggtgaaaccccatctctactaaaaatacaaaaattagccaggtgtggcagggggctcctgtaatcccagctacttgggaggctgagacaggaggatcacctggacctgggaggcagaggttgtagcgagccgagatcctgccattgcactccagtctaagcaacaagagcaaaactccatctcgaaaaaaaaaaaaaaactaggaatactagaggagaggaggtgaggcagacaggctccaagactcctccatgattcccacctcctgatgtctgcactctgtgtgatccctcgagtgtgagctggacccaataacttgcttctaacaatagactaggacaatgtatgccaggagcagtggctcacgcccataatctcagcactttgggaggctgagacagagggatcacttgagcccaggagttcaagaccagtctgggcaacatagcaagaccccatctctataaaaattcaagcattagctgggtgtggtggtgcacacctgtagtcccagctactcgggaggctgaggtgggaggattgcttgtgctcaggaggtcaatgctgcagtgagctatgattgtgccactgcactccagcctgggtgacagagtgagaccttgtctctctcatatatgtgtatatatatatacatatattttttttttgagatggagtctcattctgttgcccaggctggagtgcagtgcagtggtatgatctctactcactccaacctccgcctcctgggttcaagcgattctcgtgcgtcagccttccaagtagctggaattacaggtgtgcagtatcacgacctgctaattttttgtacttttagcagagatggggtttcaccatgttggccaggctggtctcgaactcctggtctcaagcaatccacctgcatcggcttcccaaagtgttgggattacaggtgtgagccaccgcgcctgacctatgtgtatatatatacatatctatagatagatagatagatagatagatagatagatagatagatagatttaatgttaccattttattcatcatggttttgcattaatcttgacttttacaaaatatcacaataaaataatatttatgagttcaggacaaagttcttgagttctttgacaccccctgaaattttgttcccaagtcaagcatccaccttgcctctcattccagccctacagcttaatgatatgagaccatcgtcatgcacaagacaggactggatgagtgacatctacagattctgctgccacactggactcaaggcaggttcagttctgctgcagtaacaagccagggaaaaaaatgagccaggcatggtggcacacacctgtagtcccagctactttaagccccaaatctcaggagcttaaaacatcagaggtttcacttttcactcagccagcatctggcatgttgcccgttgccaaggcagaagaaaaagaacatatagcatgctctgcagcagctcttaaagcctctgcccagaagtgacacaagtcaaacctgctcacatgccattggtcagagcaagtcacgtggccacacaagtgggtggagcaatgccttcctaccttgtacctggagggagaaagagctggaatattggtgaatcgctcagtgatcatagcagtgtccctgggtgaggtccagagggcagctgtatgtctggaggtagacagggaggtccaggtggagacatgtaagaggctttgggatataattggtattgacttcttggagggcctgatcaccccctactatggaggacacatgggggtcacctgccaggacccacaggatgggaatcctgccccagtctcctctgagactggatttttttttttttttgattttttttttgagacaggatctcgccgaagtacagtggtgcaaccatatagttcgctgcagcctcaacctcttgggctcaagcaatcctcctgcctcagcctcccgagtagctgggaccagagtcatgtgccatcaggcctgggtaatttttaaactttttttgtagagatgggggtgcgggtctcgctatgttgccctagctggtcttgaactcctggccttaagcgatcctcctgcctcgtcctgccaaagcgagccaccgtgcctgtccttcagcctggataaaatttgtggtgaaatacacatgacatgaaatgttctatcttaaccattttaagtgtacagttcagttacattaagaaaattgtcaggccgggcgtgggggctcatgcctgtaatcccagcactttgggaggctgagatggacagatcacttgaagtcagaagttcaagaccagcctgaccaatatggtgaaaccccgtctgtcctaaaaatacaaaaattggccaggcacggtggtgtgaacctgtagtcccagctactgggaggctgagacaagagaatcacttgaacccaggagacagaggttgcagagagccaagattgagccactgtactccggcctgggcaacagagtgagactcagtctcaaaaagaaaagaaaattctcagttgggcacagtggctcacacgtgtaatcccagcactttgggaggctgaggtgggcagatcatctgagatcaggagtttgagaccagcctggccaacatggtgacaccctggctgtactaaaaatacaaaaattagccaggaatggttgtgcacacctgtaatcccagctacttgggaggctgaggcacgagaatcacttgaacccaggaggcagaggttgcagtgagcccagattgtgccactgcactgcggcctgggcaacagagtaagaccccgtctcaaaacaaaacaaaacaaaaaccagaaaaaataaattctcatagttgccactgacaccatcattcatctccagaactttttcatcttgcaaaactaaaactgtatccacaaaacaactccccgttcctcctccctccagttcctggaaaccacaattctactttctgtttctatgaatttgacaagtttagttacttcctgtaaatgtgatcatacggtatttgttcttttgtggcaggtttatttcacttagcataatgccctcagggtgcattcatgttatatgtacgagaatttccttcctctttaaggctgagtaatattccactgtatagatagaccacattttgtttatccattcatctatccatggagactggttgctttcaacttttggctattttagctaatgctgccgtgaacataggtgtacagatgtctctttgaactttgctttcaattcgggtgtctatgcagaagtagaattgatggatcatatgacaattctatgtttaattttttttttttttttgagatggagtcttgctctgtcacccaggctggagtgcagtggcgcgatctccgctcactgcaacctccacctcccgggttcaagcgattctcctgcctcagcctctcgagtagctgggattagaggcagctgccaccacacccggctaatctttgtattgttgtccaggctggtctcaaactcctgacctcaaatggtccacccacctcggcctctcaaagtgctgggattacaggcatgagccaccatgcctggcctctatgtttaatttttttaggactctccatactgttttccacagtggctgcaccattttacattgtcaccagcagcccacaatggtttcaatttatggggttttgttttgttttgcttttttttttttttttttttggacagggtctcactctgttgcccaggctggagtgcaatggtgcaatcatagctcactgcagccttgacctcctgggatcaagcgatcctcttgcctcggcctcccaagtagttgggactacaggtgcatgccaccatgctcagctaatttttaaatatttttagaaatgaagtcttcctttgttgcccaggctggtcttgaactcctggcccaactgatcctctctccttggcctcccaaagcattgggataacagttgtgagctaccacttctaacctattttctgtttttttgatagtagccatcctaatgggtgttaggtagtatctcactgtggtttttatttgtttattcatttatttatagagatggagtcttgctatgttgcccaggctggtctcaaactcctggcctcaagtgatcctcccacctcggcctcccaaagtgctggaattacaggcgtgagccaccgcacctggcctgtggttttgatttgcatttccctaatgattggtgactttgagtatcttttcataggcctattggacatttgtctggcctggaattttaacaactctgtttcaaaggaagcacagagtgtgggtgtcaatctccttgccaatgtcagggccgcctgacctcgtggatagcaggcagcccagagctggctcctcgggccggacagaagctgggcatgagaggctgtcgtgggagtgacaattccactaggggaatgccagattgccactgaactttgtcactaagacccacaccaaaggccccagaaagccccagtgacacttttgcccctagataggagggtaccgacaggaaatgctgtcagaaaaatgcctccttgtacactcaaaaatggcttttgccgtctgcccagaggggcccctctccccctgactcaccgtagcagcgcgtggaggacaattttggctgtgacaacgtcacgcccgctgcggggagttgatctgcaagccacaaacgtcattcattcctctccacctccaggatttggaacatctccccggaccacagatttttccttcaatcaacttgcttttcctttaaaaaaaaaaaaaaaacttaaatgaatttatttgggaaggaacttttatgccaccaccacaaaaggaaacaaaaggaaaccagggccatttccataagtagaaagcaacagcaaaaggacctatatttgtaggggtgggggtgaaattaaacttgcttcctgctgtcgcctggttgaagcctcaagagccgggactagggtagggagagggaggtgcccaggcgtagaatataatgagtcgctcactcgcaggaccctgggatccacagcctcaccctccagtgaagctctggatcaaagagactgctctttttgtttaaaaaaaaaaattgaaaggagacaaaaagggaaagaaataggccaggcgcagtggctcacgcctgtaatcccaacagtttgggaggcagaggcgggaggatcgctagagctcaggagtccaagaccagcctgggcaacataatgagacccctgtctcattataaaaaagtaaagaaaaaaaatggggaaggaaattaaaaaccgaaagcgacgactgaagtgtttagaggtgtcagagatatagctgtgaaaaactcagacttctttttttttttttttttttttttgagacagagtttcgctctgtcgcccaagctggagagcagtggcgtcatctcggctcactgcaacctctctgcctcccaggttcaagcaattctcctgcctcagcctcctgagtagctgggattacaggcatgcgccaccatgcccggctaatttttgcacttttagtagaggcaggatttcaccatgttggccagactggtctcaaacgcctgacctcaagtaatccacctacctcagccttccaaagtgctaggattacaagcataagccaccatgcctggtctattttatttatgtatttattttattttatttttttgagacagagtctcactctgtcaccctggctgcagtgcagtggtgcgatttcggctcactgccacctctgcctcctaggctcaagtgatcctcccacctctgcctcccaagttgctgagactacaggtgcacactaccatgcccagctaatttgtggagtttttgtagagatgaggtctcgatatgtagcccaggctgctcttgaactgctggactcaagcaatcttcctgcctcggtctcccaaagtgctgggaatacaggcatgagccactgcacccggcctgttttttttttttgtttttgttttttttttttatggaggtgagattgacatgacataaaatagacccttttaaagtgcatggttcagcgccatttagtacattcactacgttgagcaaccatcacctctatctagttccagaatgttttcaacaccgcaaaaggaaaccccgtcctcattaccactcattcctcattcctcctccccagcccctggcaaccaccaatctgttttctggctatgaatttgcctattctggacatttcatataaatggaatcgtgcactatgtgaccttctgtgtctggcttctctcactcagtatcatgttttcaaggttcatccaccctgtagcatggatcagagcctcgttcctttttatggttgaattaaaaatcgctttttatggtaattgtgaaccgtgctgctatgaacatgggtgtataagtatctgtttgaggtcaggcacagtggctcatgcctggaatcccagcgctttgggaggctgaggtgggcagatcatttgaggtcaggagtttgagaccagcctgaccaacacggtgcaaccctctctctactaaaatacaaaaattagccgggcatggtggtgggtgcctgtaatctcagctactcgggaggctgaggcaggagaatcacttgaacccaggaggtggaggttgcaatgagctgagatcgcgccactgcactccagcctggacaagagtgagactccatctcaaaaaataaaataaacataagtatccatttgagtgtctgccttcagttttctcaggtgtatactcaggagcagaatggctggatcacagggtcactctacacgtaactttttgaggagccgcaaactgttttctatgcctggaaagaagtgaaagggagacctccatccaagggacagagccctggggatgggttgattctcaccaatgctttcccatcgcttctttctgggactggctgggaccgtcagtgccatctgtggccctatttctcgggaacccacaagcccacaacagaagaggcccagaggcatgcggaggggttgacccgggtgggcacccagcctgaataagcccccttcctcccctggccttccccacccatcgaaagtcaagggaaggattctgagacccccgtcctcacagtgccccccagaagcctgaccccatccttatcgggacatcagcaccaccccgctcagaagactttgcaaaatggggaagacactgagagctgcaagaaagtgacaaaaatgccaccaagtgtcacacagcgttcccagctcagggcttcttgttggctgccaccagttccccacccccacagccacccctgagctgttcccctcccccaccctactctcctttgcttcctctaaacgcttctccttaaaacctttaaacattttaaaattcttttttaaatatttgtatagagcctcaggtttatagaataaatgaaacaatgcaattcttgggaccatcggtctatccatgatcagctttattttacttacttatttactgagacagagtctcactctgtggcccaggctggagtgcagtggtgagatcatagctcactgcaacctcaaactcccaggctcaagagattctcccacctcagccccctgagcagctgggattacaggcacgtgccaccactcctggctaatttttgcattttttgtagagactgggttttaccatgttgcccaggctggtctagaattcctgggctcaagggatcctcccgcctcagcctcccaaagcgctgagatcacaggcatgagccactctccctggcgcattttatcttccttgatacaaactcttttcagaattctctgtttttgctttggtctctgataaaatcacgtctgaatataaccgcaaaacaccacatgcctgcgttacatggcgttatgttaaacagccatcattttggctgggtgcagtgatccatgcccatctctactaaaaatacaaaaaaattagccgggcgtggtggtgcgcgcctgtaatcccagccacttgggaggctgaggcaggagaatggcttgaaccggggggcggaggttgcagtgagccgagattgtgccactgcactccacactccagtctgtcgacagagcaagagactctgtctcaaaaacacacacacacacacacacaaaacagccatcattttaggaaacgtttatacctggaaacttctgtgtgtattattcacaatttgcgggaataaagaattttactttgcaagaaaatatgtaaattaaaaaataaaagggaaggaaggcatacccatgagcctccctcttcaccaagaactgagatatgaccttgttcccatgctcccatgtttatcttgctgattaccaccactccgaatattctttgccccttattcctttgctcagttacttaattttttttttttttttgagacagagtcttgctctgtcacccaggctggagtgcagtggcgtgatcacagctcactgctgcctcgaattcctggcctcaagccatcctcccacttcagcctcctgagtagctgggactacaggtgcgagtcaccacacctggcaaattttttatttgtatttttggagagatgggggtctcactatgttgcccaggatggtctcgaactcctgggctcaagcgatcctcccaccttggcctccccaagtagctgggattataggcatgagccactgcgcctggcccagccttgtttatttttatttatttatttattttattattattgtttttttttgacacggagtcttgctctgtcacccaggctggagtgcggtggcgctatctcagctcactgcaacctccgcctcctgggttcaagtgattttctgacctcaggctcctgagtagctgggattacaggtgcctgccaccacacctggctaactttcatacttttagtagagatggggtttcaccgtgttggccaggctggtcttgaactcttgacctcaggtgatccgcccgcctcagtctcccaaagtgctgggaggttacaggggtgagccactgagcccggccgccttgtttatttttcaaagtcttcttgcatatgtttgtatcctgaaaccaaatctcgttttatgatctttgtgtctgagctttttcgcaaggtggctttttcctatggggctttggagactttttcaagattctactgtggaatctgtcacgctgcaatttaagatttttttctcctgacttcactaagtttttaaattgaagaaagaggtgtggctaggcatggtggcatgcacctgtaaccccagcattttgggaggctgaggtgggcggatcacttgagggtcaggagatcgagaccagcctagccaacatggtgaaactccatctctactaaaaatacaaaaattagccaggcgtggtggcgtgtgcctgtaatcccagcttctagggaggttgaggcaggagaattgcttgaactcaggaggcggaggttgcagtgagccgagatctcgccactgcactctagttcgggcaacagagcaagactctgtcccctgccccccctcaaaaaattgcacacccctggagttattttttcacagctgtataatattccaagtgctttataaagttaccgctgaggaagtgctagggttttattaatgacttaatgaccatcatgttcatagattgctttgaaggattaatgatgcccttttaagcatttcacccttttcttcctccttactgccccaaatcttggtgatctctgggaggggccaagactggggacacttttgggcccagctgcccatgaggaccccacttctgcttcggccacttctgctcagctatcctcgaggttgcttatataccatctatttataaccccgcccccccaccccacgtcacccgccccctgccagggcaaccagtgaactcagtgtccatggggaaggggaagtgggttactaggtgctagagtttgtttggggtttgggggtgcctctgctgcttcctgaagggcttcatttcctagaagctgagaacactgagctgacagatcaaccccccttccttcccacagtgggtcatggggccaaggaggaagaagaggaaccaggtgctggcaccccaggtcgcaaacacatgcactccccctcagccccggagcacggggcctcgttgccttgtccctctgagccatcgcggcctctcgcttctgccctctttatgtttgggctcctcctggacttcccttcagcaccagagacccctgcagcccagaccccaggagactaagaggcctgggtggtctctgggatgggcggggaggcacacatgtgcaggactggctcttccccactctgctccagggccgaggccccaaatagctggacttctatatttagaagctggctcagcagcaccagggaactataaatacagcccagatcagtgcagcctccaaaatccccaggccaggctgggatgagtagggagcaaggagttagggagatgtcagtggggccagatggggtctgcagtgagggccccctgggccaggtgcacactgacaggccaggctcccggaaacccaggtgttcagcctgctggaggagacaaacagaccatagtgggacctgcccccggtgggggatcagggttggccagcgggcttcccaccctctttcccgttctctggggcttcctggcacagggacagctgtctggtctcacaatagctgcgccgccctcctggagccagctgcggggctcatccgtgtgggggctgcccggccccttcctctgccattgtctcccagccagggggcatcctgttatgcccccctccacccggagaccccatctgaccccccgcctcagcccaggcttgtgcgggtgctgggcaagggctggcggcataagaagccggggagtggggcgttggggtctcctggtgtccctccctgttgcagagggcagcaaagagacagttcaccccgctctgggatcatcctaaccgcggctcctgttgtttattgagcgtccatgcccacctacacttctgcaatgcgttccctccagtctggtcctcacgggcacctggagaagttctgaccatttcacagatcgggaaactgaggcccggaaaggccacatcacctgcctgagaccacacagcccaaaagggagctctgggcgtggtggcttatgcctgtaatcccagtacttttggaggctgaggagggtggatcacctgaggtcaggagttcgagaccagcctggccaacatggggaaaccccgtctctatcaaaaatacaaaaaaattagcctggtgcggtggcaggcgcctgtaatcccagcttactcaggaggctgaggcaggagaatcgcttgaacccgggaggcggaggttgcagtgaaccaagatcgcgccactgcactccagcctgggcaacaagagcgaaactccatctaaaaaaaaaaaaaaaaaagtaaaaaaagttagccaggcatggcggcacgtgcctgtattcccagctacttgggaggctgaggcgggagggtggcatgagtccaggaggtgcagtctgcctcaagccataattgtgccactgagttccagcctgggcaacagagaccctgtctctaaaataataataataaattaggctgggcgtggtggctcacgcctgtaatcccaacagtttgggaggccgaggcagtcggatcacctgaggtcgggagttcgagaccagtctgactaacatggagaaatcccatctctactaaaaatacaaaaaaaaaaaaaaaaaaaagaattagccgggtgcggtgtcagatgcctgtaatcccagcttactcgggaggctgaggcaggagaatcacttgaacccaggaggtggagggtgcagtgagtcgagatcgcaccattggactccagcctgggcaataagagtgaaactccgtctcaaaaaaaattatactaatatattataattatattataataattattatattatataatataattattattattatattatataatataattattataattatattataataattattatattatataatataattattactatattatataatatattataatgttacatattatatattataattattatacgattataataattattagattatataattatacgattataattcttagattatataattattattatatgactataattcttagattatataataattatattatataataattattatactataattatattatataataattattatacataataattctattatataattattatcatactataataattatataatataattattttatactataataattatattatataattattattatactataataattatattatataattattattatactataataattattattgttggttggataatcttgggttgcttctttttttttttttcttttttttgagatggagtcttgctctgttgcccgggctggagtgcagtggcgcgacctcacgatctcacgatctcagctcacagcaatctacgtctcctgggctcaagcaattctcctgcctcagctgcccaagcagctgggattacaggcaatcttgggttacttctgagctgagcaacctggggccagtggctcaaaacgcccaggtgccagtttcccttttgacaaatgaggaccatgttcccgcccctcatcattgcagaacaaaagtcatgaggttgtccagaagctgcaaaataggtcagcaggactgagacttcaggacaaagagaaagtggagaaacataggcagacgccccggcagggaccagatcagcgaggctgaaggaggcttcctttagctgggcggcagcggagtggagtggcaggagtactactaatttgcatggtttaccatatagggccccactcagcacaggctctgtgctggtgctctgcagagaaaaagacaaaagtcactcagggggctgacagcctaatgcggctcgagggcagattgttgcaagggaagaagggagatggtgagaagtattggagagactcaagaaagccgccaggaatggtgactcacgcctgtaatcccaacgctttgggaggctgaggcgcgtggatcatttgaggtcaggagttcgagaccagcctggccaacatgatgaaacttcatctctactaaaaatacaaaaaactatccaggtatggtggtgcatgcctgtaaccccagctgcttgggaggctgaggcaggagaatcgcttgaatctggaaggcggaggctgcagtgagccgagatcgtgccactgcactccagcctgggctacggagagactctgtctcaaaaaataataataatgaaaataaataaataaaaattaaaaaatgaggacctggttgtgctcacctggaatcccagctactcgggaggctgaggtgggaggatcgctggagcccagcagtttgaggctggaatgagctatgatcgtgccattgcactccagcctgggcaacagcagactctatctctaacataaagtaaaataaaataaaataaaataaaaaagtgtcgatgatcactatgaaggggtgtagggacaatccctggcatcaggaagcgcctcctgcctccctgagattctgcagacaccagctgtctgacgtgcccatctgatctgcagagaagggacgttgagccctggggttctagctggagtttctgactttctgagaaaaaaagggcaaaatccctccagagctggtctggccctctctccttccagcttctgctggtgttcattcccctcccccacagcccaggccacccccacaggagcccaggacaggaaggggtaaattctaggactggggatgtttgattattcccaggacaatagttctgtgacttcagtgattagtgactttttttccccatcgctgcaatctccccctttgaacaattgaactatattttgcttagcattcatcacttctgcatcttgaatttattcatgtaacaaggagacttgatttcggcatcctcactgaaaaaccctcctcattgccccaaatagtagggaaacctaaaaataaatgtgaatataaggaactcaaaaccaagtccttgaattctggctggacacagacgcctgctaagcctcagggtcacggaggcgctaaagacatgttagtgcccagtagagactttcccctgggctcattgtagggactctggggctgggctgcccgcctatggatcttctcagctgggtaggtcacttgtgcctcagtttcctcctctgtcaaatgggaatgacaacatcattgcagatgttttgaggagtaaatgagttaaaatagattaaaaaaaaaacaaacttatgaccaggcctggtgcagactaagtgctctataaataatagcattttcttggcagcatagcgagagcttgtcttaaaaaaaaaaaaaaaaaaacttaagaaaaaactagccaggcgtgatggtgcacagctgcagtcccagctcctcaggaggctgaggcaggaggatcctttgagccctggagtttgaggctgcagtgagctgtgatggtgccactgcactccagcctgggtgacagagtaagatctcttaaaaatatatatagcgtttgtttgtttgtttttagacagtttcactcttgttgcccaggcttgagtgcaagggcacaatctcagctcaccacaacctccgcctcctgggttctatcagtcctcctgcctcagcctcccaagtagctgggattacaggcatgtgccgccacacccggctaattttgtatttttagtagagacagggtttctccatgttggtcaggctgagtctcgaactcccgacctcaggtgatccacccacctcagactcccaaagtgctgggattacaggtgtgagccaccgcacccagccaaaaaatagcgttttaaaaaattatgaggtagctcaagagacaagctaatcatgtgatttatccagaaaggaaagaaccctcctatcacatgattctctgttgattaacgaagaggcctctgaaatataagtttcccacagggggaaactggcttagaaagatcagaaagatccaggaggtctgctctgtgcggtgaagcttctcttcttggcacctgcctggcatcggaagagggccccttctccctccctgggcttttatgtggacactgtaatgcctcagttttctttctttctttttgtttttgacacaggatctcactctatcacccaagctggagtgcagtggcaccatcatagctcactgcagcctcaaactccccagctcgggtgattctccccgcctcagcctcctgagtagtagtagctgggactacagatgtctgccaccagcctggattatttatttatttattttgtagaaacaagagtttcgccatgttgcccaggctggtgtcaaactcctgagctcaagcgatcctcctgcctcggcctcccagagtgctgagatcacaggtgcgagcctctgcacccgacctgtttcctcatctggaaaatggcagggaaacgttctgccagctgggacgcaggctctgccaactctggcatgccaaagctctgggcacagggcgagtcccaccagcgtgggcgtccagagctatttctgacaagacccctttgcgcctgcccagggaagagccaagtggccccaggcaagaccgccccgcccggctgccacaccttcccctcagagcagccagccccaacacagaggccaaagggttcgtcagagccacatggtggaaactctagcagagggtttttgaaagcaggttgcacttcattcttactgagtgcacgtgtgtgtgtgtgtgtgtgtgtgtgtgtgtgtgtgtgtgtatgcagcgcccctgggtctgtgtttttattgcactttcctgctggcttccagctgcaccgccagttccggggagggccctgggccagcggctgtccgccccccctccttcataaagtcctggcctcgggacagcctgcacagctgcctagcctgtggagacgggacagccctgtcccactcactctttcccctgccgctcctgccggcagctccaaccatgggaggccgcgtctttctcggtaagtactttggggccccgctgggaggggcgaggaagctccagcgggaccccttggctgcgtctgagaaacgggaggcgccgctggtgtctgtggggcctgcgatagaggaagccacatggtcaagcaggcactcacgggcacacggcgagaggggctggtggtgcttgggcacccccacaccccggcaggaactccagggtgctcttggagcctgctaccctgcctggagggatcctcaagctttctactggagccagtctggcatctgctccctaagaggggaaactgaggcacgggggaaggaaaggggcaaaaagtgagtgctgggaccctgagagccgctgtgcttaatataacgcatagaaggacatgggcgggggtggggaagctagaagccaggacttctccactgcaaggtacccccaatttgtccctcgcagtctcagcagcaggggcagcccccagagaccccagttcttgctccccgcagacctggctggggctcagctgcggatcgaagggactttgcctggttctgggtttgaatttgatttttgttgtgacttcctgggactccctttcccgccccacccaaggtgactgtaacggttatcagggtagctcgttgcctaagcaacggggcaacaaagagagtgaagaaatgacatttggggcaaaaaccagaacttcctggaccacagggacacagcttccctgggccagccccaagtggcaggtgtcagctcagcaccccgccttggcttgagagtgagagacaagagcccaccttgggtttcttgggggcacacttgttgggggcagttgccaagacctggcttcccaagggttccacgccctggctgtctgtgtcaccagggccaagtcagagagcctctgcgcctcacttttctcatctataaaatggagcacaacccgtctccgtcttagattgttttaagggatgagtgagttaggacacaaactattcctggttcacagtaagaattaggtaaacagcattttaaaagtgttggctgggcacagtggctcacacctgcaatcccagcactttgagaggccgaggcaggtggatctcttgagcccagggactggagactagcctgggcaacacatcgagacgttgtctctaccaaaaacaaatttttttttttttttttgagacaaagtctcgctcttgtcgctcaggctggagtgcaatggtgcaatctcggctcactgcaacctccgcctcctgggttcaagcgattctcctgcctcgcccccatccaccccgagtagctgggattataggtgcctgccaccatgcccggctagttttttgttttagtttttgtgtttgtatttttagtagagacggggtttcaccatgatggccaggctggtctcaaactcctgacctcaggtgattcacccgcctccgcctcccaaagtgctgggattacaggcatgagccaccgcgcccagccaaaaaaaattttttttaattagtcgggcttggtggtgtgcgcctgtagtcctagtggctcaggaggctgaggtgggaggatcccttgagcccaggaggttgaagctgcagtgagctgtgtttgcaccactgcactccagcctgggtgacagagcaagatcctatctcaaaaaataaattaataataaggccgggtgcagtggctcacacctgtaatcccagcactttggtaggcccaggccagcagatcaccagaggtcaggagttcgagaccagcctggccaacatggtgaaactctgtctttactaaaaatacaaaaattacctgggtgtggtggcgggcgcctgtaatcccagctactcgggagcctgaggtaggagagtctcttgaacctgggaggtggaggttgcagtgagctgagatcacgccactgcactccagcctgggtgacagtgagaccctgtctcaaaataaatgaataaataataaattatgatgattattaaattctggtaagacactagtgggtctggggaattgtctcggggtccttaggaggaagcctaaagaaggggtgactgccccaccaccccccaccccaggatctcaatgcaggaaactgactacttagggctcagcccagagaatgcaaaccagaaggaactcaaaccagaacagcagcttctctcccggcttctgtttgggcaacttccaaggccccagatggaggcagctgggccctgtagcctcacggtgggagtagagaacccagctcagcccatgcagaggggatggggcacaaaggaaccctgcccagggccctgaggacctcaatccctcaattcctccttccccaacctcttctgtttattggattcctcctgatccttttctgggctccaagcctcagtttctctatctgtagaatgggcatcaacacagcccctgcctcctagagtggttctgagctttaaaggagttacctggggctttgggagttagagatgaatctgcctagatcctgtcctgccaggggaggtcattttgtggtctgttctgcaaagaggaactgggttctggccgagggaggaactagccaagccttgtggccagagaggaggaagaggggaatcctgacagaagtggggagtacgggcttgggctggggggtttcggccttggtttaacccagctggaaggagtgtggaggtgggagtggggatctctgccttccacccacctaaggggtactaaatttgaacacagtggctgagtggtccggggacctccaatctgcaccccaaacacccgccctctgaagctgtgctcataacagaccccaaaattcccctggaagcccctccagggttgaattggggcaaatgagtggtgagtcattccttcccttaggcccaggaagtgactcatgcccagccgttgtcctggtccccatccctctgcccgacaccccccttcaggtctccctggattattggggtccccagtattcccagatcggcagggactggacgtcccctcccagcccgccccaggccccacctgccgctcatatcccaacgccctccgttcccctgcccttcccctctgtttccatccaccctcctttctcatggttttctttcttcctcactgtttatctctctgtctctctgttctctctgtcccatctcctcctgtttccccttctgctctttatgggccccttgtttctctctccacctctctctatcaccatgtaatttctgtctctctgtctgtctctatctctccgtgtctctgtctcctctgtcttatatttctctagctgtcttctttctcctctctgtctccctctctctctccagcttgtctcctttctcctctctgtctccgtctctgtccctctatctctctgtctctctctctctttgttcttttcttttctttcttttttttttttttgagactcttgctcttttttttttttttttttttttgagagtcttgctctgttgcccaggctggcgtgcagtggcgggatctcagctcactgcaacctctgccttctgtgttcaagcgattctcctgcctccacctcccaaatagctgggattacaggcgtgtgccaccatgcccggctaattttttgtatttttagtagagatggggtttcactatgttggccaggctggtctcacactcctggcctcaggtgatccatctgcctcggcctcccaaagtgctgggattacaggcgtgaaccaccaagcacagccccccaccttctgtctctctgtctctttgtgtctctgtctctctttctgtgtctctctttctttctgactctttctctctctctgtctgtctctctctctctctaatctctattttctctccacccctgcttctttgtctctatctctctggtgaacagcaaggagatccctaggtccccatctctgaatcccctggtgacctgaggagggtcccccagaacatgccttgggagggggaaccccctgagtgctgggaaccgccactccacgtgcaccccaacaggcggctacagcgtcttcctgtgggaggggggcccgggggtgaaatatcaccactgggttccaggacagaccgccagggccagtggcagttgtgggtgtggtgtgtgtgcacctgtgtccctgaggaagcgtggaggtccagggcatctcagagcctgggtgatccaacaccgtcatttttttttttttttttctgagacggagtcttgctctgtcactcaggctggagtgcagtggcgtgatcttggcttgctgcaactctgcctccttagttcaagcgattctcaagcctcagtctcccaagtagctgggataacaggcacccaccaccacgcccagctaattttttgtattttcagtagagagggggtttcaccatattaggcaggctggtctcgaactcccgatctcaagtgatccacccgcctcggcctcccaaagtgctgggattacaggcatgagccactgtgcctgaccacgccttcatttttacctaaagaaatgaagatggcaggcagggcctggcggcttgtgccagcactttgggaggccaaggcaggtggatcacgaggtcaggagatcgaaaccatcctggctaacatggtgaaaccccttctctactaaaaatataaaaagttagccaggcgtggtggtgggcgccagtagttccagctactctggaggctgaggcaggagaatggcgtgaacccgggaggtggagcttgcagtgagcagagatcacaccactgcacttcatcctgggcaacagagcaagactccatctcaaaaaaaaaaaaaaaaaaaaaaaaaagagaggccgggcgcggtggctcacgcctgtaattccagcactttgggaggctgaggcgggcggatcatgaggtcaggagatcaagactaccatcctggctaacatggtgaaaccttgtctctactaaaaatacaaaaaaataagctgggcgtggtggcgggagcctgtggtcccagctactcgagaggctgagacaggagaatggtgtgaacccgggaggcggagcttgcagtgagccaagtttgcaccactgcactccagcctgggcgacagagcaagactccgtctcaaaaaaaaaaaaaaaaaaaaagagaaatgaagatggcaggctgggcacggtggctcacgcctgtaatcccagcacttttggaggccaaggcgggaggatcacttgaggccgggagttcaagaccagcctggccaacatggtgaaaccccgtctctacaaaaatacaaaaaaatcagccgggcttggtggcgggtgcctgtaatcccagatactctggagactgaggcagaggaattgcttgaacccgggaggtggaggttgcagtgagccaggatcgtgccatcgcactccagcctgggcgacagagagagactctgtctcagaaaaaaaataaaataaataaataaataaaagaagaagaaatgaagatggcagtaaatgctcaggcacaccggacagcagtcatgtggtttactcccacacacactacactggggagtgggcgccatcatccctattctacagagggaaactgaggcagagaggcccactgtctgggatttgaactggggatgcctggctcctgtctgttttcttagccactccccacacaccccaggtcagaagagcagcagctggagctgagacccccaccaggctcatggcccttccctactcagttcctgaaactccaccctcaagccgagctcgggaggctgaggcggggaggatcgcttgaggccaggagttcaagatcagcctgggcaacagagcaagactctgtctgtaaaataattttttgaattatttttaggccggccacagtggctcatgcctgtaatcccagcactttgggaggccgaggtgggtggatcacgaggtcaggagatcgagaccatactggctaacacagtgaaaccccatctctactaaaaatacaaaaaattagccgggtgtggtggtggacgcctgtagtcccagctactcgggaggctgaggcaggagaatggcatgaacccaggaagcggagcttgcagtgagctgagatcatgccactgcactccagcctgggtgacagagtgagactccgtttcaaaaaaaaaaattatttttaattttttggcctggcatgataaattattttattttaaaaattttgagtcaggaaatgtggctcacgcctgtaatcccagcactttgggaggccaagacaggcagatcacctgaggtcaggagttcgagaccagcctggccaatatggtgaaaccctgtctctagtaaaaatacaaaaaattagccgggtgtggtggcagactcctgtaatcccagctactcaggaggctgaagcaggagaatcacttgaacccaggaggtagagattgcagtgagccaagatcacagcattgcacttcagcctgggcgacagagcaagactctgtctcaaaaagaaaaaaaaatttagtgcacacctgtggtcccagctacttgggaggctgaggcaggaggatctcttgagcctaggaattggaggctgcagtgagatatgattgcaccactgcactccagcctgggtgaccaagcaggagcctgtgtcaaaaaaaaaacaaaaacaaaaaaacccgcccctatgggaacagggtgacagactctttggctttgagcatctgagtgggacatgacatctgctcactctgaacgaccgtcaggatctgagcctgagaggggtcagcatcctcctcccacaaagtgcatcacccttacgcctcctttcccaccctgggatcccctctgaccccctttcctttctctgttgcagcattctgtgtctggctgactctgccgggagctgaaacccaggactccaggggtgagtctgctgggaagcagaaagcacagtccacagccagagcctggggagggtcctggacccccgcccagcccccttcagcccagggaaagagagggctcgcgcacgagaaactcagcgccctgccccatctcccccagtgccccctttttgtgtattcccttacccctcaccttctgaccgtgctccctgctcttgcaggctgtgcccggtggtgccctcagaactcctcgtgtgtcaatgccaccgcctgtcgctgcaatccagggttcagctctttttctgagatcatcaccaccccgacggagacttgtgacggtacagaggcttgagggcagcgcaggggacatccgcgattatgaggcattgcccagccagtgggggacagaggttgttgtgaggggccacagccttaccttccagactatcatcatggccagagaaaagaaaaagagggcaggcgtggtggctcacgcctgtaatcccagcactttgggaggctgaggcgggcagatcgtttgaggccaggagtactcagaagactgaggggagaggattatttgagcccaagagtttgaggctgcagtgagctatgattgcaccactgcactctagcctgggcaacagaatgagatcgtgtctcagggagagggagaggaaggggaagagggagagggggagaggaaggggaagagggagaggggtagggggagggagaaggggaggggaagggggaaagggagggggatggggagggagagggggaggggaagggggaaggggaggggaaggggaggggaagggggaaggggagggggatgggggagggaggggggaaggggaggggaaggggagggggatgaggagggagacggggaaggggagggggaggcagagggagaggaaaggaggcaggaaggaaggaagggaggaagggagggagagagataggcccggcatggtgggtcatgcctgtaatcccagcacttcaggaggccgaggtggacagatcacttgaggttgggaattcgagactagcctggccaacatggtgaaacctcctctctatactaaaaacacaaaaaattagccgggggtggtggtggtcacctgtaatcccagctactcgggaggctgaggcaggagaatcgcttaaacctgggaggtgaatgttgcagtgagccgagattgcgccactgcactctggcctgggcgaccagagcaagactttgtctcaaaaaaaaaaaagagagagacagagaaggagagaaagagaaagaaaagtaggcccggcatggtggcttacgcctgtaatcccagcagtttgggaggccaaggcgggcggatcacctgaggttgggagttcgagaccagcctgaccaacatggagaaacctcatctctactaaaaatacaaaattaaccgggtgtggtggcccatgagcacatgcttgtaatcccagctactccgggggctgaggcaggagaatcgcttgaacccgggaggcggaagttgcagtgagccaagaccgtgccattgcactccagcctgggcaacaagagtgaaactctgtctcaaaaaaaaagagaagaaaagaacaagagagagagggagggagggagggaaagaagagggagggagggaaggagggaggaaggaaggaaggaaggaaataagggaagaatatgaagggggagaagtaagaagtgaataggcatggcttcctggagagagagaagctgggtgctcaggaatctggagtctgtgcctcagtttacccttaagactggggagggggtacattctggctatgaggtttttttttccttttttttttttttgagacagagtctcactctgtcacccaggctggagtgcagtgacccgatctcggctcactgcaacctccacctcctaggttcaagcgatcctcctgactcagcctcctaagtagctgtgattacaggcatgcaccaccatgcccagataatttttgtatttttagtagagacggggttttgccatcttggccaggctggtctcgaactcctgacctcaggggatccacctgcctcagcctcccaaaatgctgggattacaggcgtgagccactgcacccggccgccatggggtttaaatttctacaaagagactggggatggggatgtggagcttcctgtccatccctcacctcagcactgttcactgtgtccaaatctaagatgccagccagagaactaagatcaagtgtggtcttcaggaatggcttgctccagctgcagcatagcctgtgcagtgcaacttaagattttttccaaaagatactaagcagcaggccccatgttggggagtcaggatgggggtctctgccctgacagaactcacatctttgggaggtgactccctgtcctgttgtgttccagacatcaacgagtgtgcaacaccgtcgaaagtgtcatgcggaaaattctcggactgctggaacacagaggggagctacgactgcgtgtgcagcccgggatatgagcctgtttctggggcaaaaacattcaagaatgagagcgagaacacctgtcaaggtaagaaccaccccacgtcctctgactttccatccatgaggtttggggtcaccagagccattctggcagcatccagagagcagggccttggttgtagggtcagtgcctggcgtctgagatgggacaggtgcacatgtacctaccccaccaccccagagaggcagagtgatgtgaggattaagggctgactctgggaccagctgcctgggccaaatcctgataaccaagtgtatgacgttggccaggatacttattcagaaaccgctgtccacatgtgagatgtgataacgttatcatgcttgtaattccagtgctttgggaggctgaggcgggaggatctcttgaggccaggagttcaagaccagcccatagcaacatagcaagaccccacccctataaaaggggaggcgaaggcaggtagattgtttgagcccaggggttcgagaccagcatgagcaagcgggtgaaaccccatctctacaaaaaataccaaaaaaaaaaaaattaattagccaggcatagaggcctgcgcctgtagtcccagctactcaggaggctgaggtgggatgattgcttcaggctgggaggtcaaggctgcagtgagccatgatcaagcccctgcactccagcctgagtgacagagcaagatcctgtctctaaaaaagaaaaaatcaaaccaaagctttcttggaggcaggattttaaaaaattaaaaacattaaatgaaaaaagaactggccgggcgcagtggctcacacctgtaatcccaacactttgggaggccgaggtgggtggatcacaacgtcaggagtttgagaccagcctgaccaacatgatgaaacccccgtctctactaaaaatacaaaaattagccagacatggtggcacgcgcctgtaatcccagctaccagctactccagaggctgaggcaggagaatcgcttgaactcaggaggcagaggttgcagtgagccaagatcgcgccactgcactccagcctgggtgacagagtgagactctgtctgaaaaaaaaaaaaaaaaaaagataggttgggtgccatggctcatgcctgtaatcccaacactttgggaggccaaggtgggaggatcacttcacttgagtctgggagttcaagaccagcctgggtaacatttcaagaccccatctctacaaaaacaaaaatatagacaaggggaagaaagagtccttatcttttatttgttttgtttgtttgtttttgagacagagtctcactctgtcacccaggctggagggcagtagtgtgatctcggctcactgcaacctccgcctcctgggttcaagtgattctcatgcctcagcctcccaagtagctgggattacaggcgtgagccaccatgcccaggctgagtccttatcttttaaagataaaaacaaaagtagctttgacttttgttaaatatagaccttggacaggttactttcaccttgttaaaaggttaaagttactttcaccttgctaaaaggggagtaatggcatttacctacaaaagtatttaacaggctgggcacagtggctcacacttgtaatgctagtactctgggaggccgaggcaggtggatcatctgaggtcaggagttcaagaccagcctggccaacatggcgaaaccctgtgtctactaaaaatacaaaaattagctgggtgtggtggtgcatgcctgtaatcccagctactcaagaggctaaagcacgagaatcgcttgaacctgaaaggcagaggttgcagtgatccgagatgacagcactgcactccagcttaggtgacagagcgagactccatttcaaaaaaaaaaaaaaaatggctaggcgcgatggctcatgcctgtaatcccagcactttgggaggccgaggcgggtggatcacgaggtcaggagatcaagaccatcctggctaacacagtgaaaccccgtctctactaaaaacacaagaaattagccaggcatggtggccggcatctgtagtcccagctactctggaggctgagtcaggagaatggcgtgaacccgggaggcggaggttgcagtgagccgatattgcgccactacactccagcctgggcaacagagcgagactccatctaaaaaaaaaaaaaaaaatcacttaaaagctcctggcttgcagaatgcactctatcagcaatggctaatggggattttattgtaattctgatctgatgcgcccccaggatgggtatccgtagggtgcgagatcagagagcagctgcaaggctctacccctgcgcagaggccacagcctttgctatggtcttgcttgaggccacagctcaggccgggagaaactgggactccaggctttgcctattttccagggaagctggttgggcaggggaggggcttccaggattcacaggggcagatgggagccagcagtgggcagctgggagctgcgactcattcaaagagagggagttagtgcagggtaccgagatcaggaagaggagtggtgcagaggtgggaggtgatgagactcaagactacagagagaagaaagggccggcagcccagatcccagccccacccctcctgccctgcattcaggcagagcacagagggataaagagggaggtgggttgggggacaaggcagagatgcatatacctgggacgtacacctgcgtggagcccagaaggaggcttctgtccgccacactgctagtccccagggcccccttgcaagtggacatcatgttaccccacatgcatgtgacttggccagaggagacagagtcttcatgtgaactggaaaaagatccccctctcccggtggatacatttgacaaacaaaaagtgggctggttttcagcccctgctcatctcattggcccaatacctgtgcagtgagcaacctgcacagctgtacttggtgatcatggtttcctcccagggtgctctggctaggggtgccgcccacccactgctatgaaccccctgcatgggatggtggttgtggttatgaaggaggtgtgttgctgtgttagaaacaggcctgggctgagagaaggggactcagtcaggcagctgggcagagacatggacagcagggctgaggtgataagagggacctccacggacatcaaagcaggtgatggagccaacagcctgctggtttggagcaggacctatgaccagaggtgagacgctcagaggggcctgggcccctccctttaacccaaggcactccaggcttcgctattgcacctgaggacacgtgcacccagtgtcacagcccatggggcctgtgacatccaggccagagacctcgggcggctccctccactcctcacccccctgtctccaggcatctcagggccatcctaaacccctgatcacccgtctttgtcccaaccctgagactcgggacactccacaggaggccactttggaagctcggaacatccccctgcccatctggcatcttatttgcataaaacaaaagggggctggcactcaggatatttcatgggctcatgacatggcgtgtggtggcgcattccagtacagtatccatcctctccgccatcgccggggactgccaggatgagacttgctgccaccggggctcccatgagctcagccacacctggaacccctctgacacccacacctaccataatgaaccccaaaaccctgtccagaaactcaggaggagggaatctcaaggacaggacaactgtctccagccagcagccttgcttggagaagatgcctcccgaccacctttctggccgtttagccctcatccatttccccatccaaggctccaccctaacccaccctggtaattcctgggcctgaacgcaccgtcaatgaccaaagcttgggaggatgctgtggccaggtgtgggcagcgtgatgtggaccccacaaatggattcagagggctgggtgccgtgactcatgcctggaatcccagcactttgggaggccaaggtggaaggatcacttgaggtcgggaattcgagagcagcctgaccaacatggtgcaaccctgtctgtactaaaaatacaaaaattagccgggcgcagtggcacgcacctgtaatcccagctactcaggaggctgaggcaggggaatcgcttgaacccgggaggcagaggtcgcagtgagctgagatcacatcattgcactccagcctgggcaacagagagagacgctgtctccaaaaaaaaaaaaaaaaaacaaaaacgcactcagagggttggatgaaggaggcggctccagcctggactagccggcaagagacagcatcactggggaccatcgtcccaggcccgatcctctcctgtagtcagtcctggtctggaccactcaaggacagagatggaagcttgaaccccattcagcagggcccacaggtctctgtccctggtggaatgacaagggatgagaggacagatacatctgccacccctcacccatcggcacctgtgccctctctagccacaggcccccgctcacggccagttctgcttagatatggattctcaccaaatcctgctatttccatatccatagatcctttcctggggatcagaaaaaagcatctttgtagactcggggctgcctggctggacatcagcccccactgttcaccccagcctggtgcccactgtccgggcagccctagcctgtcccacatcatcccgcactctccccacccctgctattgccctgcatcgcgggggcactggcttagggaggggtcttggtccatgcccatgaagctgggctctcagagctagtgtggatgggagagcagcatcctgctagggccaccaggatgctgagaatttggccagcgagcggccgttctgtgggagtcaggccgagggccaccgttgggaaccaagacgtgtcctgcccaggcgcacggcatgtcccctgcatttggttctcaggaaggccccaccctggcctttgcccggaatccttaggctgggacacagatggctgggacaccccagcttggagctgcccaggaaggcagaggagaaggggaggacttggctgcttccagccacatctggacaacagaaggactgagccaccaccctcaccataggatgcctctgtgtggattggaaaagggaggagacagtggtgccttccagatgcttccgtgccaggaaacatggcggaccctcagccctgaaagctgctcacagctacgggcatccttcaccctctccttcctcttgcagatgtggacgaatgtcagcagaacccaaggctctgtaaaagctacggcacctgcgtcaacacccttggcagctatacctgccagtgcctgcctggcttcaagttcatacctgaggatccgaaggtctgcacaggtagaggccccaggaagacgccgtgaggctggacgggagctggggatggagctgaggcacgtcctccaaagcagccgaggaggagggggaagatccgcaggttcccacaaggtcaaggacctgctaagcccctgcctaaggattcacctcccaggaaggtcctgccacacggcagggaggcggcagggccttcagggctggagtgcccttgtgggcccccagacctcaccccttcctcatctgtcacgtgcgagtggaagaaggtgtcacttccagttctaagaaggggaatctccactatgaccagggagggagcagatgagagtttttagtttttagtcatggaaatctagctcccatgactcagtttcccttttggtttcacctcctataaactggggaccatggtccctgctgtgcccatctggtaggaagaccatcataagatgctttgaaggtgaagttgaaggtcaccaagtggcggcatgtgcaataatggtcttcagtctgaggcaatgaaaagataggggagtgggtgcagtgagtggagggcaggcccaggctggtcagggacagggtttgaccctctggctttgtcctcagatgtgaatgaatgcacctccggacaaaacccgtgccacagctccacccactgcctcaacaacgtgggcagctatcagtgccgctgccgcccgggctggcaaccgattccggggtcccccaatggcccaaacaataccgtctgtgaaggtcgagagctcagatcccacgtttctagcgacccacaaacatctgatcacatgttcaacggcgcccacacaaaccaagcagaatgagcgctggaggcacctggctgtgccaggcgttcgttcattcttctgaggctagatgagaaaagagcaagggtcctccggaaggagctggggtactgagggggaaggctcagggggaccccaggcaacagctgatgactcactgggaggaaggcgtttcaccatattcataacctgctcatctgcacggggcccacctgctgtgcccaggcctctccacgcttccataacccagcgtccaccactccaaggggggcactaatgccgggaggaatgagctgggggcacagacaggagacaggaccctctccaggctgggacaggacctgacccccttcttcctgtcctcagatgtggacgagtgcagctccgggcagcatcagtgtgacagctccaccgtctgcttcaacaccgtgggttcatacagctgccgctgccgcccaggctggaagcccagacacggaatcccgaataaccaaaaggacactgtctgtgaaggtatgacctggccctagaagctccccacccccagcacacacactgacaagcggcctaatgagccgcttgtcttgttccctacagatatgactttctccacctggaccccgccccctggagtccacagccaggtgagtggcccccacagggacgaggcggcgggaactccatccacacagcactgcatccgtctccttgttctaaacttcccacccgccgtccaggctctctgacccccacatctcctctctctgcagacgctttcccgattcttcgacaaagtccaggacctgggcagagactccaagacaagctcagccgaggtcaccatccaggtaagggcaggatgctgggggaccccaggacagtgtagaatcagctagcggaggcttccatgtggccagagagagtgcccaacccaagcaggggcctctagtcagagacacacatgcgcataacatacacacaccacatacagtatgtgcacaaacatacacacccggacacgtgaagacacacgcatgcacacacacacaccaggtataatggcaacagagtgcagcacttaagaacctggagttgaggccgggcacggtggctcacgcctgtaatcccagcactttggaaggccgaggtgggcagatcacgcggtcaggagatcgagaccattctggctaacatggtgaaacccccgtctctactaacaatacaaaaaaaaaaattagctgggtgtggtggcgggtgcctgtagtcccagctactcagcaggctgaggcaggacaatgacgtgaacctgggaggtggagcttgcagtgagccgaggtcgtgcagctgcactgcagcctgggcgacagagccagactctgtctcaaaaaaaaaaaaaaaaaaaaaaagagcctggagttgggccacagaagttcaaatccccccattgccacttcttgctctgtgatctaaggcaagtgacttgccctctctgggcctcggttttctcatctgttttgggggttgtggtgtgtttttttttgtttgtttgcgttttttttttttatttggaaacaaggtctggctctgttgcccattctggagggctgtgacatgatcatggctcgctgcagcctcaatctcccaggctcaagtgaccctcccacctgagcctcccaagtagctgggaccaaaggcatataccaccatgcctggcttatttatttatttaatatatttatagatgggggtcttgctatgttgcccaggctggtcttgaactcctgggcttaagtgatcctcctgcctcggcctcccaacatgctgggatcacaggcgtgagccactgtgtctggccagtttcctcatgggcaacacaggcatgaaagtaatgcctccttcatatagtcagtgtgaagggtaaatcaactaatagaagtaagactcagaacagtgcctgacacatgataagccttatataaaagctttcctggccaagcacggtggctcacgcctgtaatcccagcactttgggaggctgaggcaggtggatcaccagagatcaagagtttgagaccagcctggccaacatggcgaaaccccatctctactaaaaatacaaaaaattagccgggcgtagtggcgggcgcctgtagtcccagctacttgggaggctgaggcaggagaatggcgtgaacccgggaagcggagcttgcagtgagccgagatcccgccactgcactccagcctgggcgacagagcgagactccgtctcaaaaaaaaaaaaaaaaaaaaaaaaaaaaaaattagctggcgtggtggtgcacgcctgtaatctcagctactcaggaggctgaggcaggagattcacttgaacccggaggcagaggttgcagtgagccaagattgcaccactgtactccagccagggcaacaagagtaagattttgtcttaaaaaaaaaaaaaacagttttcccatatgtttttagcacagtagaaaaatgatgtgagccacttaacatcattttaacttttccagtagctagattatttagttagttagttttagagatacggtcttgttttgtcacccaggctggagtgcagtggcacaatcacagctcactccattctcaacctcctgggctcaagcaatcctccctcctcagcctcccaagtattaagagctgagactacaggtgtgagccactgtgcctaattttttcattttttttttttcttttttgtgagacggagtctcgctctgtcgcccaggccggagtgcagtggcacgatctcggctcactgcaagctccgcctcccgggttcatgccattctcctgcctcagcctcccaagtagctgggactacaggcgcccaccaccacgcccagctaattttttgcattttttagtagagatgggatttcaccatgttagccaggatggtctcgatctcctgacctcgtgatccacccaccttggcctcccaaagtgctgggattacaggtgtgagccaccgcgcccagccattttttcattttttgcagagatgggggccttgctatgttgcccaagctggtcttgaatcctgggttcaagtgatcctcccacctcagcctccaaacgcactggaagtacaggcgtgcaccaccgtgcctgttgtctaataactacactttataaagtaaaaataaagttaaattaaagttaagattgcaggccgggcatggtggctcaagtctgtaatcccagcactttgggaggctgaggcaggcagatcgcctgaggtcaggagttcaagaccagcctggccaacatggtgaaaacccgtctctaaaataacaaaaaaaattagccgggcatggtggcgggcacctgtagtcctagctactagggaggctgaggcgggagaatcacttgaacccagaagtcggaggttgcagtgagccaagatcgcgccactgcactccagcctgggagacagagtgagacttagtctcagataaataaataaataaagttaagattgcatttaacctaatagatccaacgtattaaccactttaacatggaatgattttttgctttttttgttttgatctgagatcgtgccattgcactccagcctgggtgacaagagtgaaactccatctcaaaacaaaacaaaaaaaaaattacaaaaattagccgggtgtggtggcacgcttctgtagtcccagctactcagaaagctgaggtgggaggatcgcttgagtctgggaggtggaggttgcagtgagctgattatgccactgcactcaagcctgggcaacagactgagaccctgtctcaaaaaaagaaagaaaaaagaacaggaaatcaaaacagagcctggcaggcagcccgtgcccaaccagtgttaagcgctgtgattcatacgtgcatgcaggcaaatactcaatccgtcgcttgttttctggttactgcatcatctcagtgattcccttgtgcctgtgggtctccagtgtgtcccctggtagggggtgacatccaggtccttcaggcaacccctgtggtctgatgctccagcgattctgtcacccgccaccccctagaatgtcatcaaattggtggatgaactgatggaagctcctggagacgtagaggccctggcgccacctgtccggcacctcatagccacccagctgctctcaaaccttgaagatatcatgaggatcctggccaagagcctgcctaaaggccccttcacctacatttccccttcgaacacaggtgaggccttggcctggcctgccctgccccaaccctgggccccacctggtacctggggtccctaatcacaactgcccctctcccctcagagctgaccctgatgatccaggagcggggggacaagaacgtcactatgggtcagagcagcgcacgcatgaagctgaattgggctgtggcagctggagccgaggatccaggtagcagcggtggtctggagggggagcccgtgggagagagatggaggtgctgggatggggccagggtgaggttcagaatagaacaactgactgggcgcggtggctcacgcctgcaatcccagcattttgggaggcccaggtgggtagatcgcttgagctcagaagttcaagaccagcctgggcaacatggtgaaacccggtctctacaaaaaatacaaaaattagccaggtgtggtggcacgtgcctgtagtcccagttactcaggaggctgaagcgagaggatcaattgagcccgggaggtcaaggctgctgtgagctatgatcacgccaaagcactccagcctggacgacatagtgagaccctgtcttaaaaaaaaaaaaaagtccaggcacagtggctcatgcctgtagtcctagcaccctagcactttggcaggctgaggtagatggatcacccgaggtcaggagttcaaaactagcctggccaagatggtgaaaccccatctctactaaaaatacaaaaattagctgggagtggtggcaggtgcctataatcccagctacttgggaggctgagacagaagaattgcttgaacctggggagtggaggttgcagtgagctgagatcacgccactgcactccagcctgggcgaaagagcgaaactccgtctcaaaaaaaaaaaaacaaggaacaactagaaactgactcatcgggaggggctcctggcgtcatcgtggtggactggctgagcctgagctgggtcatcttgggagggaggatagagcatgggaggaggacaacgggagtaggcagcgagtgtgtctgttccccaggccccgccgtggcgggcatcctctccatccagaacatgacgacattgctggccaatgcctccttgaacctgcattccaagaagcaagccgaactggaggagatatatgaaagcagcatccgtggtgtccaactcagacgcctctctgccgtcaactccatctttctgagccacaacaacaccaaggaactcaactcccccatccttttcgccttctcccaccttgagtcctccgatggggaggcgggaagagaccctcctgccaaggtctctgctcactctgctcacttcctcaaagataacccagggccttcgcacatgctgggcctctctctgggatgctctttcccgacgtgactcagtcttttatgtttctggccttctgatttgggccttccccaacctcattacttatttatttccttactttatttatttaatttaattaattaatttatttattttaagacagagtctcactctgtcgtccaggctggagtgcagtggcacgttctcggctcactgcaatctctgcctcccaggttcaagtgattctcctgcctcagcctcccaagtagatgggattacaggcatgcgccaccacacctcgctgattttgtatttttagtagagacggggtttctccatgttggtcaggttggtctcaaactcccgacctcaggtgatctgcccgccttggcctctcaaagtactgcgattacaggcgtgagccaccactcccagactttcttttcttatttatttatatttttagacaggagggtctcactctgtggcccaggctggagtgcagtggcgcgattatagctcactgcaacctcgaactcctgaactcaaccattcctccagcctcagagttttgagtagctgaggctacaggcatgcaccaccactcccagctaatttttttatttttgatagagacggggacctcactatttttcccaggatggtctagaattcctgggctccagtgatcctcccacctcagcctcctgagtagctgggactataagcgtgcactactatgcccagttaattaaaaacaaaaaaattaatggagatggaggtctcgctatgttgccacagctggtctcaaactcctggcctcaagcgatcctcccaccttggcctcccaaagtcctggaattacttacaggcaagagccatcatcatccctggccaccttctaatgcactatctacattacttattcgttaggtttatgtcataatctgcctctcccactttttttttttttttttttttttttttttgagatggagtttcactcttgtcatccaggctggagtgcagtggctcattctcggctcagtgcaacctccacctcccaggttcaagcgattctcctgcccaggactcccaagtagctgggatttacaggtgcttgccaccaggcccagctaatttttgtattttttagtggagacggggtttcgccatgttggccaggctggtctcaaactcctgacctcaggtgatccgcctgcctcagcctcccaaagtgctgggattacaggcatgagccactatgcctggccacctctcccactcttatgtcaacctcacaagggtaggtacttgtgtgtgccctgttcactgctgtgtctccaaacctgttacattcagtaggcgctcggtcaatactcatctagtaaaaagcagccctcttagactcagcccaagcccaggacctaagagtgagctccaggccaacctttctgaccacccccatctgcccacaggacgtgatgcctgggccacggcaggagctgctctgtgccttctggaagagtgacagcgacaggggagggcactgggccaccgagggctgccaggtgctgggcagcaagaacggcagcaccacctgccaatgcagccacctgagcagctttgcgatccttatggctcattatgacgtggaggtaagtagctggaggcatcctcaagtgcccacaggtaatgaggtccagctgcaaccagacaggcagctagttctccatggagccctactggttgctcagatatatctgcatggttgcacagcccaggtgtccccacgtcacacccttcgcagcctcttcctttggcctcttctctacaacccagcaactatacactgggtgcagccactagctccgctcctctgcctgtccatcccgtaccagttgtgagatgtcaactaaaagctccccatggagagcattccaagggggcaccacttgcccgtttttttttttttttgagacggagtctctgtcgcccaggttggagtatggtggcacaatctcagctagtgaggttcaagggattctcctgccttagcctcccgagtagccgagattacaggcgtgcaccaccatgcctgagtaatttttggtatttttagtagagacagggtttcaccatgttgcccaggctagtctcaaactcctgacctcaggtgatccacccacctcggcctcccgaagtgctgggcttacaggtgtcagccaccgcacccggcctctttttttttttcttttggacagagtcttgctctatcgcttaggctggagtgcagtagtgtgatcttggctcactgcaacccccgcctccggattcaagcgattctcctgcctcagcctcccaagtagctgggattacaggtgcatgccaccatgcaccgctaatttttgtatttttagtagaggcggggtttcactatgttgggcaggctggtctcgaactcctgacctcaggtgatctgccccccctcagcctctcaaagtgctaggattagaggcatgagccaccacacccagcctggagcaccactttctgtacgtgacttcagtaggatccatcgttaagctgggccttgtcgaaaactgcaattaaccaggcagagaaggggggcgcctgtggtccaggccaaaggcccagcaagcacaaaaatgtgaaatccctagactccccttccagctggtaagtgtggccagatctaggagggacaagggaggaggtcagagaggtgggcccgtcaaagtgtgggggggaaaagggaccacaaagagggcaggaaggcctcatgccctgaaggaaccctgagcacccggtgccactcctaggactggaagctgaccctgatcaccagggtgggactggcgctgtcactcttctgcctgctgctgtgcatcctcactttcctgctggtgcggcccatccagggctcgcgcaccaccatacacctgcacctctgcatctgcctcttcgtgggctccaccatcttcctggccggcatcgagaacgaaggcggccaggtgaggtcccgccccgctccctcctgagctctggggtcagggaggcctgggaggggttagccccgcccactcccggggctcagtcgggtaggcgggccctggaggcatgaggccccgcccctgtccgggatctggccccgcccaccggggggtcgggttgtctctttaaagggcgctggctttggagctgcctggccacaccccgagtgcccgctcgcttctgagcgttgttgggggtgggccctggggggaaacctggcccccgctccagacccgcccaccctccggctgtggtcccgcccactctcgggacctggcaggcgactggctctggcgccgcatgcccctccccgcgctgacgtcgctccgcccctccgtccccgccccgcaggtggggctgcgctgccgcctggtggccgggctgctgcactactgtttcctggccgccttctgctggatgagcctcgaaggcctggagctctactttcttgtggtgcgcgtgttccaaggccagggcctgagtacgcgctggctctgcctgatcggctatggcgtgcccctgctcatcgtgggcgtctcggctgccatctacagcaagggctacggccgccccagatagtgagtgcagcgagatggggcaggaggaaggcggggtgctgggcctggggctcacaggcagtgccacacacaatgtccggccgccctccgttccgctcctggcttcctggggcactgatgggacccctcccttccctcctagctgctggttggactttgagcagggcttcctctggagcttcttgggacctgtgaccttcatcattttggtaagtacccactctccctccaccgaagcccgagcgccacaggcccaggcccggctggaccatcgctctcgccctctaacccacaatctgctccctgcccagtgcaatgctgtcattttcgtgactaccgtctggaagctcactcagaagttttctgaaatcaatccagacatgaagaaattaaagaaggcgaggtgagaggagaggctggaaggacttggaggcggggccggggtgaggggcatgaagctggaggtgaggtgggggcccacgctgcaaccccgctcctcgcagggcgctgaccatcacggccatcgcgcagctcttcctgttgggctgcacctgggtctttggcctgttcatcttcgacgatcggagcttggtgctgacctatgtgtttaccatcctcaactgcctgcagggcgccttcctctacctgctgcactgcctgctcaacaagaaggtgggggcctgggcacagtggcgcacgcctgtcatcctcccacctatttgggaggctgaggtgggaggattgcttgagcccagaagttggagaccagcctgggcaacataaccagatgctgtctttacaaaaaaattcaaagatagccagggtgaggcgcctgtaatcccaacagtttgggaggccgaggtgggcagatcacctgaggtcagtaattcaagaccagcctggccaacatggtgaaaccctgtctctactaaaaatacaaaaattagccaggcatggtggcacacgcctgtagtcccagctacttgggaggctgaggcaggagaatcatttgaaccaggagtgcagtgggccaagatggcaccattgcactccagcctgggtgacagtgagacttgtctccaaaaaaaaaaaaaaaagccgggtgtgctgaatacccatctcagcttctcaggaggctggggcaagaggatcacttgggcccaggagttcaaggttgcagtaagctatgatggtgccactacactccagcctgggtgacagggggacccgatctcaaaaaaaagacaaacacaaaaacaccaagaaggtggggctgagggcagagcatggggaggagcgtgcatggtcccagggcctgctcctgccctgacttggtgtctgggccggcaggttcgggaagaataccggaagtgggcctgcctagttgctggggggagcaagtactcagaattcacctccaccacgtctggcactggccacaatcagacccgggtaaggggctgcgcctggggcgggtgtgggcaggaaggcaccagggctagcggggctcaggcctctgggctctcctctccaggccctcagggcatcagagtccggcatatgaaggcgcatggttctggacggcccagcagctcctgtggccacagcagctttgtacacgaagaccatccatcctcccttcgtccaccactctactccctccaccctccctccctgatcccgtgtgccaccaggagggagtggcagctatagtctggcaccaaagtccaggacacccagtggggtggagtcggagccactggtcctgctgctggctgcctctctgctccaccttgtgacccagggtggggacaggggctggcccagggctgcaatgcagcatgttgccctggcacctgtggccagtactcgggacagactaagggcgcttgtcccatcctggacttttcctctcatgtctttgctgcagaactgaagagactaggcgctggggctcagcttccctcttaagctaagactgatgtcagaggccccatggcgaggccccttggggccactgcctgaggctcacggtacagaggcctgccctgcctggccgggcaggaggttctcactgttgtgaaggttgtagacgttgtgtaatgtgtttttatctgttaaaatttttcagtgttgacacttaaaattaaacacatgcatacagaagatggccttgcctgctggtggtgattcagaggccgggcccagggtgtccgtgaaaggccaagatgaccaagaaatagatggggtgggagccaggcttccataataacaagtttattctcatacaatctctagcttctcaacagtggcgcctggaaaggggaggtgaagctgcatgcgggcggctccgggtgggcggctctggcacgtggtggttaccggctctgctcgactgtaagacatgagatgcagtgaactgaagggccgggggaggaaccctctgccccagacccctggccctgcccaaggcacttactgtatgtggagatgtcgatttcctctggaagttctgccacattaacttcaaaccggtcctggacgtcattgaggattttggcatcattctcgtcagacacaaaagtgatggctaggcctttggtgccaaagcgacccgcccgggccacctgcaggcagacaggatcagggtcaggccacagatactacctcaggacttgaggaaaagcagggctggggccccaccccaccgccaggggaaagcaacatgcccgtgaggctgctcacccggtgcaggtaggtgtccgagtcctcaggcatgtcgtagttaaagacgatgttgactcgctcgatgtccatcccccggccaaacagattggtggccaccaggatccgccgctggaaatccttgaactgctgatagcgtgacaggctggggtgcaggagaaacaagtggaggccgtcagacactgggctcctggtggtgctccctgcagccttggcgggcggctcgcactcaccgctcctcctgggccatgccccggtggatggcgatggccgggaagttctgctccacgaggagctgggccagggccatgcagcgctgcactgacttgacgaagattatcacctgagggaaggagtggcagtcagggccacacagtccctgtggcccagtgacctcccgaaggtcctgagccccaggacaggctgatggaagtatcacctggttaaactccagcacatccaagagatcaaagagcttgcggttcttctcactgtctttgagtttgacgtagtactgctgcaggccgtgcagcgtgagcttggtctcgtcgtccacaaacacctccatgggctgtgtgggaagggaggtgggaggggcgggcagggatcacctctgggcatctcgcctgcccagaaccttccagtgggcgactcctttgtgcgacacttcccagaggacctgctgcaccagacctcagtaaacatcgctcaaaagctggatgtaagctctggcccgactcaggtgtggaccaagcttgactcccagtttgacaagaccgaggggaggaaaggaggctccgccggctcccagcatcccagcatcctccgtgccatgtgggccgtgcgggtgtcctggggccccaggctccaggcccctggggaaggccaaagctgccactctcgccctactcacatcctgcatgaacttcctgcacacaggccggatgtccttgctcagggtggcgctgaacatcatgcactgcttctcgtgtggtgtcaggcggaagatctcctgcacatcccgccgcatgtctaggtggggagggcaagacatgggtgggcatgagcgtctgccatgcaggacccccaccccagaccagacccagacccctcccaacctgtgccagggagccagtggcaccgtgacgagggcagagtgagccgcgggagtggccagtcctggtgcctgaggggctggggggtggccagcgagcgcaggcgcgggaggagctgcaatccacttacacgctggcgcggagcagccgtgcccgtgcgcctcgagccacgcttcagggaggggagcctgaggcagagacagccgctggggtgagagctgcagctgcctcccaggacacaagcccatctcccaccggccctgtcggggctcactgagggcaggcggggcctggaaccaacccaacaggtggcagaagcctcatactcccagaggtatgtgtgcatgcctttacgtccaggagggacgggggcttgcttgggccccgtggtcccattcggctcgggctcagaaacagcacatccctctgccagcagcagagctttccccaagatcaccacaggagccccgcctgccggccgcccatgtaacccactcaagagccttccgcctgctatggggcccgcctagtcactgactctcagctggggctgcaagggcagaggactcacccagctgctccagcatcttgtcacactcgtccagcacaaagtgcttcacattctttaggctgaagctcctattccgcacgagcgccaggatgcggcccggggtccccaccacgacatggggacagttcttcttcaacacttcttcatccttcttgatggagagaccaccgaagaacacagacacctatggggatgaggaggaaaccgctccatgctgatacacggcccaaggccccaacctgcacggcccagcacctgcgaacaggaggcctcaggggaccaaggcaggcctgagagcctcccggggctccactcaaaggcagccccaggctgggacctgcgcaggcccctgggagccatgcataattcatcaggcttttaaggagcaaaaaccaccgcaaacctcaaaggcagctgcccctgccaagcttggtaaatgctggctgggccagagccgaggctaacaaagctgcagaaaccaagtggcgcctggtccagtctggcccgagggactcaccttgacgctgggcatgtacttggaaaagcgctcatattccttgctgatctggaaggccagctccctcgtgtggcacatgaccaggaccgtcacctgggaagtggcataagaagagggccttaccttaggcagtgtcctaaaccccttccccaccagagtccacccaacccagtccccctgacactgcacccaacatcacaggccatttgaaggcccggtccaaatgcctcccacttctcacggcccttccccacccctcactccctataccctcccacagctattgaaacctgtctcccaacaccaggacccacaataagaaacagaaaatggaacagaaaatggcccgcataatgtaatggttagacctggcctgcctgggtgacatgggacctggctctctaaggatttcctgaatctcggcactcgggcggccccggtcttcccacccgtgccatcagacactggaccacaccacagccctccacagcaccttcatccttcaggatgtgctctgagataacgagggcacgggcgccaatatgaagcccaaagatgtgcacctggcctgactcgggagcaagacaccagaattcactgaagtgtctccccaggacagtggcacacaagacaatgggagaagacagccagggcctaacagcaaggacagtggtgacagctatattcggggcaacccaaccttcacagatggacactctctaggtaagtggcacggcaaaacagcaacgatgcctctggggcaaggggcaaactgtgggcactttccagttattttggcttattggcaatttctaatttttgttataactaattattttttgagatggagtctacctctgccacccaggctggagtgcagtggtgtgatcatagcacactgcagcctcgacttcctgggctcaagcaatcctccagcctcagcttcccaaagcactgggctaacaggtgtgagccaccccatccagcctactctacttccgccgccacaggcagggtggggccaggaagggaggagcccacccacctgtccgttgacaggctcaatctgctgtagggtggccagcacgaagaccgctgtcttgcccatcccggacttggcctggcacaggacgtccatgcccaggatggcctggggaatgcactcatgctggactgcaggagaagcagagcgtgagggacgagaacctggatgcacccccgtgcaggatcctcaccagttgaccgggggcccacagtgagggcaatcagaagaggccgagtccggacaaggccacagacacctgcagggctggggtatccgcctggtcaaagcagaacgccccactgccgagggcagccacaggccccgctgggcacaactgatccgcgggacagacgggcccctccctcacccacggcaaactggaggcggcaccgctctgggcgggcagggctggtcttgtcttggtgaggacctgggcaagaggataacacccagaaggcgtaccctcagaaggatgctcaaagccacagtccacgatggcccgcaggagctccggcttcagcagaaagtcccggaagccagagctgtggatggaaacgtaggatcccttgatgtctttcttagggggagctggtgtgctctcttgaggagcctggggctcttcctcttcatcgtaatccaaaagatcgttttccacatcctgttctgccatgatgctgagaagagagagaggcagggtcccgcgagtgggcacagaaggatgatgaagcttcattcaaatggcattctctgccgcctccttccatgagtgagcccatcagctctacctgggctgcacctcgcagcttcgccctgtctccacctccccacccccaagctaccccatctctcccccatgcccctctggccacacccacagacagaacaccctccacctccaagggcttcccatggctcacagagttaaaatcccaactctcaccacaggccaggcaatccccttggtttgacccctgctcacctcatcccacaccacccccagccttgttcagctgctcagacccctggagcccctgccccaagcctttgaacctggctgtcaccgccaggaatgctctgcccccaggtctctgcacaaatgcctccttctccacacgcaagcctcagctccagtgaacctcctcagactactcagcccagagaagccccctccctatcactccccaaggaacccactgggctttcatggggcaggagcccaaagatcccaggggtggggctgccaggatgctggtgggaactgagtttgcgagagagcaagcagtatctgtccagccccagcttctcccactctctgtggtctgcacaggggaataattaagtgctctcatgaaaggcctcctattgggcctgggccaataaaaataaagctgagaagatggaaaatggaattaatacaaagtctgcctacctctttgctttattaatctaatgcataccaagtgcctgctgggtgcaagggacccaaacatgaggacaattgtctttcgtcctcctcccctaccccagactccagtggggggtggagcagagggtgacagctgctacaattcttcctgaggctggatgctgaggatcctaggccacttttggcctcgctgtcactcattcccggctcagaaacagcaattccattgtctcaatggctgttttctctctctcaacctccctgtccatgaggcagtgaatcccaccaaggccctctggccagttctcacctatgctaccatgctggccccaagctgctatcacctgttttattattattattattattattattattattattattattattattgagatgaagtcttgctgtcacccaggctgcagtgcagtggcgcaacctcggctcactgcaacctccacctccagggttcaagattctcctgcctcagcctcctgagtatctgggattacaggtgcttgccaccatgcccagctaatttttgtagttttcgtagagacagggtttcaccatgttggtcaggctggtctcaaactcctgacctcatgatctacccacctcagcctcctaaagtgctgggattacaggtgtgagccaccgcgcctggccttattattatttttaactagaacagctttacaggctgcgcgcggtggctcacgcctgtaatcccagcacttttgagagaccaaggcgggtgggtcacctgaagtcaggagttcgagaccagcctgaccaacatggtgaaaccccaactctactaaaaatacaaaaatttagccaggcatggtggcaggcgcctataatcccagctactcgggaagctgaggcagaaaaattgcttaaacctgggaggcggaggttgtgatgggctgaaatcacgcttcactccagcctaaaaaaaaaaaaaaaaaaaaagaaaagcttcacagagatatttacatgctatacaactcaccacttaaggcagataattcagtggtttttagtgtagtcacagacatgtgcaaccactaccacatgtgcaattttagaatacttcatcaccttgaaataaaagctcctgtaccctttacgtatccataccctaaacaccccaccccagccccgggcaaccactaatctgctttctgtttctatggatttgcctgttgttgtggacatttcacataaatgaaatcttataatttgtgacattttgtgtctggcttctttcactcagcacagtgtgctctaccacatcatcagtactcccttccttttttttcccccctctttgagacaaggtcttgctctgttgcccaggctggagtgcagtggcccaatcaaagctcacttcaacctctgcctcccgggctcaatcaagcgatcttcccacctcagcctccctagtagcaggagctacatgcgcccgccaccactaatttttgtatttgtaacagagatggggtttcaccatgttgcccaagctgatctccaacttgtgggctcaggcgatccgcccacctcagccttccaaagtgctgggattacaggtgtgagccaccacacctggcctcatttctttccatggtcacctaatgttccatctcaccaacatactacattttgcttaaccactgtcagctggacatgtaggtgccatcatctcttgcctgaattaagccaatatcctcctccctggtttccctgttgccatcccccagcccctccccagagcagccagaaagaccctatcaaactaagtcacggccaggcgcggtggctcacacctgtaatcccagcactttgggaggcctaggcgggcggaccacctgaggtcaggagtccaggaccagcctgaccaacatggtgaaaccccatctctactaaaaataccaaaaatgtgccgggtgtggtggcgggtacctgtaatcccagctacttggaggcaggagaatcacttgaacctaggaggcagaggttgcagagagccgagatcacaccatggccctccagcctgggcgacagagcaagaccaagactctgtctcaaaaaaaaaaacaaacctaagagtacatcactattctgctcaaaacttttaatgggttcctactgtgcttagaaaaaaactcgagtcctcacaaagccagcctaccgggcccctcctaacccgactcctctatactcatacctcatctcccccattgcccctcactcgccagccttgctgccgtgtctcaaacacacctcagcacctttgcacttgctgttcctgctgcctggaagggtcacaaatcccccacttcttttgggcctcctttgctccagaaaggcatttcctcacagccccaactaaaacagcaccgcttccagtcagccctgccctgtgagaacagctaataagcactccatagcaatggctgaataaatggaactagaataaaggcgttcaggcagagttgaacatgtctctttatctgacccttcaaacaggcaatctgaaggggtcacttcccaggcagcagggaaaacaggagccaagaaaggtcagtccgaaaagcaccagagccttttggggtatgcagagtaggactagctggctggcgtcagggcagaagacaaagctggaagagctggtcagccacacagggcatgtgtttgtttgtttgtttttttgttttttgagacagggtctcgctctgtcacccaggctggagtgcagtggtgcaatcatagctcactggagcctcgacctcccaggcccagtgagtccaccacctcagcttcctgtgtagctgggactacaggtgcatgccaccacgcctggctaatttttgttttagtagagacagtgtttcaccacgtttcccaggctggtcgtgaactcctggactcaagcaaacctcctgcctctgcctcccaaagtgctgggattacaggaatgagccacccaccacgcccagcctgggcctgtgtacttgttaagcaatagggaactgctaattagattggagctgagccactcaatcaggatctgcccaagagtactgtaacttactcctccgatgaaggggtaggttaagaccagtagcagggaaaaccagtcaccaaataaaagagaagtaaccagggtaggggcgtgaggtaaggaaagaaagggtgggacatgccaaaagacaggaacatcccctgaccaatccatgggtagagaaaagccacagtctattctgggctccaaatctaggtggccaagagatggtgtattttaaggaaataaagcaaagttgttttgttggtggggaaataaatttggggcaggcccggcatggtgcctcacttctgtaatcccagcactttgagaagccagcgtgggaggatggcttgagcccaggagttcgagaccaacctggacaataagtcgagaccgcgtctatacaaaaacaatttttaaaaaagtagccgggtgggtggggggaggggggagggacagcattaggagatatacctaatgcaaatgacgagttaacgggtccagcacaccaacatggcacatgtatacatatgtaacaaacctgcacgttgtgcacatgtaccctaaaacttaaaaaaacttaaaaaacacatagcccaaggggcaccttctatgtagcaaaggctaaaaaataaataagtagaaattaaaaaaagaaaaaaattagcccggtgtggtggcatgggcctgtagtcccagctacttgggaggctgtgccgggaggatcgcttgagccaggaggtcgaggctgccagtgatggcgccatggcattccagcctgggtgacagagggagaccctttctcaagaaaaataaatttaaaaaaagaaattggggcccagcgtggtggctcatgcctgtaatcccagcactttgggaggcgaagcgggcggatcacttgaagtcgggaattagagacaagcctgggcaacatggtgaaaccccgtctctactacaaatacaaaaattagccggatgtgcttgcttgaacccggaagacggaggctgcagtgagccgagatagtgtcactgcactccagcctgggcgacagagcaaggctctgtctcaaaaaaaaaaaaaaaaaaaaaaaaagagagagagagataaataaattggggtgaaccgaatctgctaagataaaattttcgagaaaccgggctggacaggatctaaagctcaaaactgattagatcaggaaaggatccggcggggttttccccgcccaaagtgggtggccatgaccgctaaggcgccaggagcgcatgaacttgaaaggtgacagcggggaactcacaacccagacacgccacgtgtacccagttaccctcaagtgtccccaggcaggctttccaccccggagtttattcccacctggggactcctatttccaaaagaaaatctttttttcattctgttttttttgaggcagaatctcgctctgtcacccaggctggagtgcagtgtcgcgatctcggctcactgtaacctccacctcccgggttcaagcgattctcgtgcctcagcctcccgagtagctgggaccacaggcgctcgccaccacgctcggctgatttttttttgtattttgagtagagacgaggtttcaccatgttggccaggctggtctcgaactcctgacctcaagtgatccgccctccttggtctctcccaaagtactgagattacaagagccaccgcgcccggccttccaaaataaagtcttatttgctctaaatctcagaatcccgaatcccgtaaaaagtagaccaagaagaaggtagactgggaaagggatcaagtccctcggacccaaagaaacccctgacaactgaaagctccaacttctcccacccaggccccagaccccggcgtcaccccctcgtccctctccaaatggccccaggccgccgcggggtctattcggacgaactgacagactccaagtggggctcggagcgccgtaggccatgacagcccctccgagaagcgggccccgagccccgagcaccgcgcgccaacggctggcccacccctagcgcatgcgccccggtgcccaacggccaacacacagcgctctgacacaccaaccgccccgcccccaccgtctcgcgaccctttctccccctccccttagatcccaacgtctcccctcgtcctctcgctctcagttcagacgtccccacaccgcggccccgcgcccgggatccgctgctcacctggctccccgttcttctccgcgcgctgctaagagacacttccaacttcggttttccgccgggcgctcagacacgagttgctgcgcttcctgcctcttgcgtcgggctgctgctctgctgactgggccgctgccttttcattcaagagaggccgaagcggtgattgggtcctgtggaagggaccgggagattattggcggagacgggaagaaagagggcgtgccttacgcctcgcgtttattggtcaatctaaaagtaggcgcgccccagtgagccgacagactggctccgacagcgcgcggtctcgtgatctgggtgtggtgctcggtgggagccgccatgtttagtactgataactgaagaccggatgattgcgttttggcgtgtgccccaccttttcgaagagtggcgtctgcgctgggcgctgaaaccagaactgtcccagttgctatcaatctgcggcctgggggtcctccacagtgtaggctctgaaaagaatagggagcttggaatgactcaaatggacagaacattttgcagtatttggatttctatcgctccacgatagttttgtctccttgattttcacgttagtagaagcatgcaataggttgtcttttgtgtctgacttttgctcaacaaagctgtttttttgagacggagtctggctctgtcacctaggctggagtgcagtggcgcgatctctgctcaccacaacctccgcctctcgggttcaagcgattctcctgcctcagcctcctgagtagctgggactgctggcgcccgccaccacacctggctaattttcatatttttagtagagaggggtttcgccatgttggccaggctggtctcgaactcctggcctcatgtgatctgcccatctccgcctcccaaagtgctgggattacatgagccaccctgcctggccgcagcaaagtgtttttgagagttgtccatgttgtggggatatcaacagctcgttattttttactgctgagtggtatttcattgtgtggctatactataatgtagccaatatagtttcactcacctgttcttggccaattgattgtttccggtctttggccactgttaatagagcttgtactgtaagagtattttggggaagataaattttcatttcttttaaatacttaggagtggcatggtggcatggtcactaagctttattagatcctggcagatttattttcctatcatccttcctccctctttccctccactttcttctttctttcttcagggtgtcactcttgttacctatcatgcccagctaatttttaaaaatttggtaaaggtggggttttgcaggccgagcgtggtggctgacacctgtaatcccagcactttgggaggccgaggtgggtggattacctgaggtcaggagtttgagaccatcctggccaacatggtgaaactccgtctctactaaaaatagaaaaattagccgggcgtgttggcgggcgcctgtaatcccagctactcgggaagctgaggcaggagaatggcgtgaacccgggaggcggagcttgcagtgagccgagatcgcgccactgcactccagcctcggcaacagagcgagactccgtctcaaaaaaaaaaaaagaaaagaaaagaaaaagaaaatgccaagtaaagaaaggatcagcgggcaccagggctcctgcctataatcccagcactttgggagaccaaggagggcggttcacttgaggtcaggagtttgagaccagcctgacaacatggagaaaccccgtctgtactaaaaatgcaaaattagccgggcgtggtggcgcatgcctgtaatcccagctactcgggagggtgaggcaggagaatcgcttgaacctgggaggtggaggttgcagtgagccgagttcgcaccattgcactccagactgggcaacaagagtgatcacctaaggccaggagttcaagaccagcctaggcaacatagtgagacctcatctctacaaaaaataaaataaaataaaataaaaattagccaagcatggtggttgatacctgtactcccagctactcgggaggctgaggcaggaggactgttcgagcccaggagtttgaggcttcagtgagctatgattgcaccactgcactccagcctgggtgaaagagtgagacccagtctctaaaataaatgaataacacattgtaattaaagtcaaagtcacggccgggtgtggtggctcacacctgtaatgccagcactttgggaggctgaggcgggcagatcacctgaggttgggagttcgagaccagcctgaccaacatggagaaccctcgtctctactaaaaacacaaaattagccagccgtggtggcatatgcctgtaatcccagctattcgggaggctgaggcaggagaatcgcttgaacctgggaggcggaggttgcgttgagccaagatcgcactattgtactccagcctgggcaacaagagcgaaactctgtctcaaaaaaaaaaaaaaaaaaaagttgaagtcacctgtgcttcactccaactcctttcctcccagtacagaaacaatgccctaaagaaaaacagtcgtactgaacagttactgcacccacctttacaagaattacagtcatggggtcacataatgacacggacatgttgaggaatgtctccataggcaatcttgtcattgtatgaacatcatggagtttgatacagtttggatgtttgtcccctccaaatctcatgttgaaatgtgatccttcttgagcccaggaggttggggctgcagtgagccatgtttgtgccactgcactccagcctgggagacagagtgagactgtctcaaaaaaaaaaaaaaaaaaaaaaaagaggaaagaggccaggtgcggtggctcacgtctgtaatcccagcactttgggagctgaggtgggcagatcacgaggtcaggagatcgagaccatcctggctaacacggtgaaaccccgtctctactaaaaatacaaaaaattagctgggcgtggtggcggacacctgtagtctcagctacttgagaggctgaggcaggagaatggcgtgaacctgggaggtggagctggcagtgagctgagatagcgccactgcagtctggcctgggtgaaagagtgagactccgtctcaaaaaaaaaagagaaaaaagaaaaagaataaaacaaaaataaagaagaaagaggaaggaaggaaggaaggggaaacgaaggaaggaagccaggcaggcagacaggtgatccgcagtgttggatgtgggacctagtgggaggtctttttggtcacaagggtagatccctcatgaatggcttagtgacatttccatggtaaagtgagttctccttctattcatgagattgctgatcgtttaaaagagcacggcactgctatcctctctcggtctggcttccttcctgtctcaccatggaatgcctgctccccttccccttcaactatgattggaaactttccgaggccctcccagaaacaaatgctagtgtcatgcttctggtacagtctgcagaactgtgagccaaataaacctctttataaattacccagactcaggtattcctctatagcaatgcaaactgacctagacaagggaacttagataaacctagatgggtctgggcatggtggttcattcccagcactttgggaggccaaggcgggtggatcacgaggtcaggagttcgagagcagcctggccaacatggtgaaacactgtctgtactaaaaatacaaaaattagccgggcatggtggtgcgcacctgtaataccagctactcaggaggctgaggcaggagaatcacttgaacccaggaggcggaggttgcaatgagccgagatcctgccattgcactccagcctgggcaacagagtgagactccatctcaaaaaaaaaacctagatggtatggctactacacgtgtaggctatgtggtatagcccagcagtccccaacctttttggcaccagggacctgaatgatggaagacaatttttccatggacgtaaggagggtggatggttctgggatgaaattgttccacctcagatcatcaggcattagttagattctcataaggaatgggcaacctcgatccctcacatgcacagttcacaatagggttgagctgctatgagaatctaatgctgttgctgatctgagaggaggcagagctcaggctgtaggtaatgctcacccatcactcacctcctgctgtgtggcctggtccctgacaggccacaaggccagggaggggtgggggtggggacccctgctatataaagcctactgctcctaggctaccaacccggacagtgtgtaactgtctgaatactgtaggcaattgcaacacaatgctaagtatttgttttgttgtttttaccttcatcttctttgtgatgttacaatggtaggtatttggatatctatacatatcaaaacatagaaaaggtactgggtgtagtggctcacacatgtaatcccagaactttggaaggctgaggcaggaagttcaagactagcttgggcaatgtggtgagacctcttctctaccaaaggaaaaaaaaaaagctaaaaagctacttcatataaatttcctttcatttccctttttatttttcccatttactttttttttttttttttttttttttgagacggagtttcactcttgttccccaggctggagtgcagtggcacgatctcggctaactgcaaccaccacctctcgggtttaagcgattcttctgcctcagccttccgagtagctgggattacaggcacctgccaccatgcccgactaatttttattttttttcaaacagggtctgggccaggcacagtggctcacgcctgtaatcccagcactttgggaaccgaggcgggtgaatcacctgaggtcaagagttcaagaccagcctggctaaaatggagaaaactcgtctctactaaaactacaaaaattatctgggcatggtggcaggcacctgtaatcccagctactcagttgtctgaggcagaataatcttgtgaacctgggaggtggaggctgcagtgagctgagatcacaccactgcactccagcctgggcgacagagcgagactccgtttcaaaaaataaaattacatgatataaataaaaagaaaaaaataaacagtctggctttcactcgggccatagtgccaggtgagatctcagctcactgtaacctccacctccttggcccactaatttttgtatttcttagaagaaatgaggttttgccatgttgtccaggctgctctggaactcctgagctcaagcaatcttcccgcctctgcctccccaaagtgctaggattataggcatgagccaccccgcccagcctcctttactttatacattttttcactttatatatatatgtgtgtgtgtgtgtgtgtgtgtgtttgatacaaatggtatcagactgcatcattttgttcctttctttctctttagtatcattaaaaaataactagaagctgggcccagtggctcctgcctgtaatcccagcactttgggaagctgaggtgggtggatcacttgaggtcaggagctcaagaccagcctggccaacatggtgaaaccccatctctactaaaaacacaaaaaattagccaggcgcggtggcacacgcctgtaatcccagctactcaggaggctgagacaggagaattgcttaaacctgggaggcagaggttgcagtgagccgagatcgtgccattacacttcaaactgggtgacagagcaagattttgtctcaataataataataataataactaaagatgatgctctccctatgctgcccaggctggtctagaactcctgtcctctgcaatcctcccacctctgcctcccaaagtactgggactacaggcctgaggcactacgcttagtccttttttttttttttttgagagagtcttgctctgtcgcccagactggagtgcagtggcatgatttcggctcactgcaacctctgcctcccaggttcaagcgattctcctgcctcagcctcccgagtagctgggactacaggcgcccaccaccacgcctgactaatttttatatttttggtagagacagggtttcaccatattggccaggctgctctccaactcctgacattgtgatcctcccgtctcggccttccaaagtgcttggattacaggcataagccaccgcgcctggcctttttttgtatttttagtagagacggggtttcactgtgttagccaggacggtctcaatctcctggcctcgtgatccacccacctcggccttccaaagtgctgggattacaggcgtgagccaccgtgcccagcctaccttgcagttttctagcttgtctttcccaagtttactccagtacctgcccttcagggaagcctacactgactgcttcctctgaagtgcgacagctaccccctccagcctttgcagtctgggatacctttcgcctgatacctcatactgtgcccactcattcctttcacaaagacggacgtagcacaggctctgtgcaatttcagggaggagtaacatgcaaaataatcaaacagggccaagggccagaaatgacgtcggtgtggtctaggaagattgctcagaagatgttacatttaaacagataactaaatgagcaaaaggggccagccctggaaagatgtgatagaaaagcattccagaacagataacagccagtgcaagggccatgtggttggaagtaaggtgagactatttgtttttgtttgttttttttttgacggtgggaggtggtttgtttttttgtttctttggtctcactctgttgcccaggctggaatgcagtagcatgatttttgttttttatttgaaacggagtcttgctctatcacccaggccagagtgcatggcactgtctcggctcactgcaacctctgcctcctgggttcaaacagttctctgcctcagccacccaagtagctgggattacaggtgcccaccacaacacccagataatttttgtatttttagtagagatggggtttcaccatcttggccaggctggtcttgaactcctgacctcgtgatccacctgccttggcctctcaaagtactgggattacaggcgtcagccaccgcgcctggccttttttttttttttttttttttttttgaggtggagtctcactctattgcccaggctggagtgcaatggcatgatcttggctcactgcaatctctgcctcccaggtttgagttattctcctgcctcagcctcccaagtagctgggattacaggcaagcaccaccacgcccaactaatgtttgtattttccatagagatggagtctcactatgtgggtcaggctggtctcgaactcctgacctcatgacccgcccacctcagcctcccaaagtgttgggattacaggcatgagccaatcgctggcctttttttttttttttttttttttctgagagagtcttgttctattacccaggctggagtgctatggcatgatctcagctcactacaacctccgcctccctggttcaagcgagtctcctgcctcagcctgctgagtagctgggattccaggtgccggccaccacgcccagctaattttttttatttttttagatggagtttcactcttgttgcccaggctggagtgcactggtgcaatctcgactcactgcaacctccgtctcccaggttcaagcaattcttctgccttggcctcccaagtagctgggattacaggcacccaccaccacatccagctaattttttgtatttaataaagacaggtttcaccatgttggtcaggctggtcttcaactcctcacctcaggtgatccacctgcctctgcctcccagagtgctgggattacaggcacgcacagcccagtggcacaatcttggctcactgcaacctccacctcctgggttcaagcgattctcaagcctccacctcccaagtagctgggattataggcatctgccaccacagctggctaatttttttttgtattttcagtagagatggggtttcaccatgttggacaagctggtctcgaactcctgacctaaggtgatcaacctgacacagcctcacaaagtcctgggattccaggcatgatccactgtgcctggccaaggtgagactatttgaagaacatagtgaaggctaatgttgctggatgggggtgaggagagtgaggtgtttggacaggtgggcagagaagtctgacaagaccaccttgtagaccaagtgaggagtatgaagtttttcctaagtctgctgggaaaccaggcacaggcacgttttctagcagggagaagcagggatggtgatggtgtgatttaggatttccaaggccccagagtgaattagagaggggtgagaacagctgcaaggatgtgccggtgcagttatcatattttgttgagattgtacaattagtcctttgtctctccccctgacactttttttttttttttttttttttttgtcttgctctgtctcccaggctggagtgcagtagcatgatcttggctcactgcaacctctgcctcctgggttcaagcgatctcctacctcagcttccctagtagttgggattacaggcgtgtaccaccacacccggctaatttttgtatttttcgtagaggcggagttttgccatgttggccaggatggtctcaaactcctgacctcaggtgatccacctgtctcggcttcccaaagtgctgggattacaggcatgagccactgtgtccagcaaccaccaccccgctccttttttatttttattgtttttgagacggagtcttgctttgttgcccagtctggagtacggtggtgcgatctcggctcattgcaacctctgcctcccaggttcaagcaattctggtgcctcagcctcctgagtagctgggactacaggcatgcgccaccatgcctggctatgtctccccgccccctttcttggtttgtttgtttgttttttgagacggagtcttgctcttgttgcccaggctggagtgcaatggtgcaatcttggcttgctgcaacctccacctcccggattcaagcgattctcctgccttagcctcctgagtagctgggactacaggcactcaccaccacacccagctaattttttttgtatttttagtacagatggggtttcaccatgttggccaggctggtctcaaactcctgatctcaggtgatccacccacctcggcctcccaaagtgctgggattacaggcttgagccaccacacctggccacgtctccccttttagcaaacaaagtgtggctggacgtggtggctcataactgtaatcccagcagtttgggaggccgaggcgggaggatcacttgaggccaggagttcaagaccatcctgggcaacacagtgagacttcatctctgcaaaaaaaaaaaaaaaaaaaaaaaaaaaagaattagctgggcatggtagtgcatgcctgcagtcccagctactcaaggggctgaggtgggaggatgacttgaacctgggaggttgaggctgcgctgcagtgagctgtgatctcacccactgcactctagcctgggtgacagaatgagactttgtctccaaaaaaaaaaaaaaggcctgaactgcaactttatctccagtgccaccaaattccccagtgggtctctgtaaatattcactgagtaaatgaatgcctgaagggtggagcgagaatttggctggtttccccagctccatctggggaggcagcctgggacctcacaggttggggagggagggcccatccctgtgcaaggtggttccagacaacccaatccttcggcccccatgaaacctcactctgccttgtcctcctcatctgtagaatgggtgggctggagaattagagggagctacttcgtttctcagggaaagggccatagacatcctggcttgatgattggggtaagggacttctcagcttactcacctgcaaaactggagcaaaagaactagtttgggccaagcttgatggctcatgcctgtaatcccagcatttcaggaggccaatgcagaagaattgcttgagcccaggagttcaagaccagattgggcaatattacgagatccagtatctacacacacacaaaaaaattttttgaaaaaactagccagacatggtggtgcacacctgtggtcccagctacctgggaggctgaggcaggaggatcgtttaaacctgcaaggtggaagctgcagtgagctgcgatggcgccactgcaccccagcctgagtgacagagtgagaccctgtctctaaataaataaatatcaggctgggcgcggtggctcacacctgtaatcccagcactctgggaggccaaggtgggcagatcacctgaggtcaggagttcgagaccagcctgcccaatgtagagaaaccccatgtctgctaaaaatacaaaattagccgggtgtggtggtacatgcctgtaattccagctactcaggaggctaaggctgggaattgcttgaatcagggaggcagaggttgcgttcagttgagatcgtgccatcacacttcagcctgggcaacgagagcgaaattctgtctaaacaaacaaacaaacaaataaataaataaatatgaaagaactagcttgcagagtttttttttgttttttttttttttttttttttgagagggagtctcgctctgtcccccaggctggagtctcgctctgtcccccaggctggagtgcagtggcgtgatctcagctcactgcaacctctgcctcccaggtttacgccattctcctgcctcagcctcccgagtagctgggactacaggcgcccgccaccacgcccggctaattttttgtatttttagtagagatggggtttcatcgtgttagacaggatggtctcgatctcctgacctcgtgatctgctcgtctgggcctcccaaagtgctggggtgacaggcgtgagccaccatgcctggccatgagttcttttcttttctcttttctttttctcccttcccctccctcccttccttcctctctctctctctctctctctctctctctctttctttctttctgacagtcttgctctatcacccaggggggtgtgcaggggtgcgatcttggctcactgcaacctccgcctcccaggttcaaaccattctcctgcctcagtctctcaagtagctgaatatacagatgcccgccagcacacctggctaattttttaatttttagtagagatggggtttcaccatgttggccaggctggtctcgaattcctggcctcaagtgattcaccccccttgacctcctaaattgctgggattacaggtgggagccactgcgcccagccacagagttctttcttttattcaatcaacaagcatttgagaaacagttagaaggctcatgtggctggaaggagtgagcaagggggagagatgggaggaagtaagaactgatggtgcagagcttcgtgggctgtggggaggacctgagttttttccctgagtgagctgggagccatggagggttctagacagaggaggggcataccccatctcatgtgttcactgctcccttgggctgttgtgggaacagactgtgggggcgagggcaaaaccaggagaccaggagagaggtgactactggttaaggtgagtgatggtagggactggatgcgacaaagtggaaaggtgaaatgtgggtgaattctgggcttgtgtgtgtgttgttgttgttttctttctctttttttttttttttttgagagggagtctcgctctgtcgcccaggctggagtgcagtggcgcgatctcggcacactgcaagctccgcctcctgggttcatgccattctcctgcctcagcctccctagtagctgggactacaggcgcccgccgctttcaccatgttagccaggatggtctcaatctcctgacctcgtgatccgcctgcctctgcttcccaaagtgctgggattacaggcgtgagccaccacacctggccccctcttttttctttttttagatggaatcttgctctgtcgctcaggctggagtgcaatggcacgatctcggctcactgcaatctccgcctcttgggttcaagctattctcctgcctcagccacccgagtagctgggattacaggcatgcgccaccacgttcagctaattttatattttttagcagagatgggtttcaccatattggctaggctggtctcgaactcctgacctccagtgatccatccaccacccaccttggcttcctaaagggctgggattacaggggtgagccactgcacccagccgtttttttttttctttctttttttagacagggtctcgctctgtcacccaggctggagtgcaggggcatcatgatttctccccacagtgatgcattctcggcctcttgagctcaagcgatcctcccgcctcagcctcctggtagctgggactacaggcgtgcgccaccatgcccggctggatgggttctggatcagcataattctcctccttctctctttctgttgttagtatctcccaaagagttgctcagaggaaaaaataagagagaaaacatcgcgccctggtttctgggacgactgaaaccacgcagagccacgggtaaccaaggtacccgcagcccacggcgcttcctcgggtcccaaagggcgccaatgtgcaggcaccgccgccagggagcgctccctgccggagccccggagaccaaggtttggctccctcgcctggtttccgaaggagtgagggtccgacggcggccacgaacaaagctgcacgctctgcagaccccggagatcccctagaaattccgcagaggcctccactctccgcttgggcacgagtctgcatttatggagcgccatctgcatgcagcagccccgaaaaagaaggcgatgcccattttatagcggggaaaactgagactcagaggccacaggggtccccaggatgaacagcaagttgggattcaaacctcttttaataacaataacgataatagaggctgggcgcggtggctcaggcctgtgtaatctcagcactttaggagaccgaggcgggcggatcacctgagatcaggagttcgaggccagcctggccaatatgatgaaaccccgtctctactaaaaatacaaaaattagccgggtatggtggtgggcacctgtaatcccagctactcaggaggctgaggcagaagaatcacttgaatccgggaggcggaggttgcagtgagccgagatcgcgccactgcactccagcatgggcaacagagcgaaactccgtccaaaaatagcaaaacaacaaacaaacaattacgataacattaaaagtgacagcagctaacacttatggagcgtctagtgtgttctcagctcttggcctgcactgtcttattgaattttaccaacaccgaggaggtgagcgcatcattcccatttcacagatgaggtgcctggaagggtttgtctccctcaaggcgtaaagcgctaggatttgaatgcagatccgcccagagcttgtctccaggtaacggggaaacttccatgcccttgaataggggaccacagatgcaggcgtcccgagcttgcaaatgcaccggggtagggtggggtggggggttattctgtttgtttttttcaggggtcccgggaggcccaaaggcctccgccgctctcggcttgaacgcgtggaaccgttctcctcgggttcccgcgcgctccaatgggggacccctcggcagcgtgcggtcgtctcgggacccggaaagaggaaaggtggggagccgatggggatgctccgggctcgggagaccgagggggcggacgggcgggaccccgcagccccgggggcctctgggaacccgtcccccctcggccccgccccctccccgggcgccgacctccggggtcacgtgaccaggcccggcggccgctggggccggagggcgcggcgcggggacgcggcggcctggccaggcgaggcgggagccgagcaggccggagcgggccgcgcgccggggagggtcgcgccgcgcccgccccctccccgccacgcccggggcgcacgcgcgctcctctggccgcccctccctccgcgcggggacccctggcgggcggcaggaggacatggccagcgacgccgtgcaggtaggcgcacctgcgtctggagtcccggggcgaccggacggcgccggcggaccccgcccgcgcgctgccgggggagcccccccagcccccggaacgggactcgggtgacgatggcaagggcgggggcctccggagcgcccggcgccccctccctgggccgggactgtggagccagcgaggcccccttctcggcaggtggcgatgtggactgggctggtttgggggcgatcccggaggcaacccctgctacaccctcaaactcggcctctcctggagaactagaaggggcgcggcggaggctctacttcgggtgtctgtggctggctgggcgtcccagtgcctctcgtccgcccccaaactcatccccctccccagggttgggtacccggcaggtgccgctccacctggggcacgtgcctggcgcagtgccctgggaggggaggaggctgctgggcccggcccgtgcccttcccccgcataacaaagctccagccacccccgcctctagacagctttatgatgttccagacgccacccagattggcacctgttggcggaagtacccgagtcactgcattaggtcgggggaatggggacccccactcccacccttgggctgtcaggtggaaccttctcctgggtggggagtgtctcagtcaacaggccagggatgctcccatatatagaatcctacttttttgcatggtggctgggcatggctgggtcacccccaccctgctaacacacacacgtgactggcaccagcctcccgcccagccagattccccttgtgccacctggtggggatcactgacctggactcatcttccccgtctgtgacaagcacggccagggtgactgccaaccttctttggttcaagtgacccaaatctgagaaatgtctgtgcctcagtgtccccattagcacctcaccatccagttcattgtcctgtggttgttgtgtaactgggttctcgtctccttctgcacctgcccccggcccctttgtgtctccccggtaacccccggtccctcccgccttcccagtcctgctgatggcctgccggccttgccgaggagctgggcgtatctggtgttgccgatcacacaaggtcagacctcaaggccgggatgggccggggtccctgcctctacccccggcccagggagggctgtgtaggaatccccgggtgcatgcatgcgcttggcgcatcccacacatgacccagacaggctgtgattcctgcaacgaggctggacccacgccctggtccccccttcccatctcctccccagtctcttccccgctcctggtcatccctctctcatggttgcttgggcctgctgccctgtccctctgtctgtcccaacgtgtgcctgtctgttctgtgtcctgcaaacggatgtcctgtccagattccggaaacgcccaaggcattgaaatctccggatgtgggagtctaggtccctggctgctctggcaagatggggattatgggaggcaggtcctctgggtctgaggtctccgctccatggtgggcagcggaggagcaggggttctccataggacaggccaggccagggccctgagtcctgggtttgccttgctggccctcaggtgacccctgtgccttgggtagaagtgagtcactcaggggaggagaacccaggagcccagcctccctccctctgtgcattacagacctcagctgctggaggtggggctgagggaggccacctctcctctctgcctggacttccccagttgagctggccccgctcttggctgtgtcctccctctgcctgctggggatggggtggggccttctgagcgagggtggtatttggtgagcctgggcttaaattccagcgctgacacttcctcgctgtgtgtcctgggcccagtgccttcgcctctctgagcctcggttctgacctaggaaaaatgggactaagagggtgttcatgggagagagagagaccgagaccttgccagcacttggcaggcagggctgctgtgaagtcgttactggtaagcgtcctggtcagcagctcagggtgtgaatctgtgtccttattgattgatttactgatttatatttatttattttagaggagagagtcttgctctgtcacccaggctggagtacagtggtgcgatcctatgtcaccgcagcctcgatttccaatttccggggctcaagtgatcttcctgcctcagcctcccaagtagctgggacaaaaggcacagaccaacatgcctggctaatttccttttacttttgtagagacagggtctcgctctgttacccaggctggaatgcagtgacgagattcttgttcactgcagcctcaaacacctgatctacaggactacaggcatgcaccaccacacctggctaatttttttttctttatttttttaaattgagactggggtctcactctgtcacccaggctggagtgcagcggcatgatctctgcctcctagactcaagccgttctcccaccccagcctcctgagtagctgggactacaggtgcacaccaccacgcctggctaatttttgtatttttagtagagtcagggtttcgccatgttgcccaggctggtcttgaaatcttgagctcaaagtaacctgcccgcctaggcctcccaaagtgctgggattacaggtgtgagccactgcccccagcctttctttttttcttttccttttttttttgtgatggagtctcgctctgtcgcctaggctagagtgcagtggcttgatctcggcttactgcaaattctgcctcctgggttcacgccattctcctgcctcagcctcccaagtagctgggactacaaacgcccgccaccatgcccggctgatttttttgtgtttttagtagagacagggtttcaccttgttagccaggatggtctagatctcctgacctcgtgatctgcctgcctcggcctcccaaagtggtgggattataggcatgagccaccgcgcctggcctctttttttcttttttgagacaaagcctggctctgttggccaggctggagtgtgatggtgtgatctcggctcactggaacctctgcctcctgggctcaagccagcttcccacctcaggctcccaagtagttgagactgcaggcacatgccatcacacctggctaattcttacattttttgtagagatggggtctcaccgttattgcccaggctggtctcgaactcctgagctcaagcagtcctccggccttggcctcctaaagtgctaggatcacaggcagagagagccaccacacctggccaatacttttttattttttgtagagatttttgtaggtcttgctgtgttgcccagacttatctccaattcctgacctcaagcactgctcctgcctcagcctcccaaagcgctgggattacagacgtgaaccaccacacctggccaaatctatgacccttaaccgtaggcttctcagccttagcactactgacattcagggctgggtcattctttgcagtagaggctgtcctgtgcactgcagggcgttgagtggcatccctggcctcaccctgatagaagtcacctccttacccacagtcaggacaaccaaaaatgtctccggatgttgccgcatgtccccgggtatggggagaaaatctcccctcaatggaaaactgttactggccaggcacagtgcctcacacttgtaatcccagaactttgggaggccgaggctggctgattgcttgaagtcaggagtttgagaccagcctggccaacatgtgaaaccccgtctctactaaaaatacaaaacattagctaggcgcagtggcacgtgcctgtagtcccaactactcaggaggctgaggcaggggaattgcttgaacccggaaggtggagattgcagtgagccgagattgcaccactgcactccagcctaggcgaaagagcaagactctgtctcaaaccaacgaacaaaacatactactgtgacttccttgagcctcagtttcctcacctgtgaagtggggagttcttggcagctgctcaagatttgtagtgagggttgggaagatggtgggagtgatacacttggtctgtggcattcctccctgggggcagctgcgcttgagatcagtcacgagccaaggataacattccttgtctgtgaaatggatgctcccagctgaaggagataaccccagggggccatttcctagccagcatttggaatctgggtgctcttgttttaaatcaaggccctggccacggggcagtgactcacacctgtaatcccagcacttttggaggccgaggcaggaggattacttgaggccaagagttcgagatcagcctgggcaacatagtgagaccccatgtctatgaaaaatacaaaaattagccaggtgtggtggcgtatgcctgtagtcccagctgctcgggaggctgagctgggaggactgtttgagcccaggaggtagacactgcagggagccatgatcacaccactgcactccagcctgggcaacagagtaagaccctgtctcaaaaaaaagaaaaaaagttacatgagatattcaactttactgtaaaatagctttgtgttagacgtttttgcccaactataggcttgggtaagtgttctgagcacatttaaggtaggccagggtgagctatgatgtttggtaggtaagatatattaaatgcatttttgacttatgatatttgcaacttatgatgagcttatcaggaagtaatgccatcataagttgttcttgaatgttactgtgtgcttagcaagtggttttgtaggctgctgatttggggcattctttttttttttttttttttttgagatagagtctcactctgtcgcccaggctggagtgcagtggtgtgatctcgactcactgcaatctccacctcctgggttcaagcgattctcatgcttagcctcccaagcagctgggattacaagcacgtgccaccatgcctggctaattttcatatttttagtagagacggggtttcatcatgttggccaggctggtcttgaactcctgacctcacgtgatctgcctcgctcatcctcccaaagtgctgggattacagatgtgagccaccacgcccggcgtgattttggaaattggaaattctttttttttttgagacggagtttcgctctggcgtgcaatggcacgatcttggctcacctcgacctctgcctcctgggttcaagtgattctgcttcagcctcccaagtagctgggattataggcatgcaccaccaaacccgactaattttgtatttttttttttttttcagtagagacggggtttctccatgttggtcaggctggtctcgacctcccgacctcaggtgatccacccacctcggcctcccaaaatgctgggattataggcgtgaggcaccgtgcccggcctggttttggaaattcttatcccagtcccccagtgctgtcccctaattgtgttggcctgagggaggtgccactgggctggctgggaccccgggcctctcagctatggtcaataacagttggcgactggactgagaggaagcaggaagttgggagggcccgtctgcaggaaaggggcctcacctctgaagaagtggctgttctgaccctgaaggggaagccggggacaaggggtggctgggagagtctggagggacatatgcaggtagtcgcagggctggaggtctgtgggagcatggatgtgctgcaggggcctcggggagcgtgcatatgtgtgtgagcatgtgcacacgcatgagcatgtgggccatgccctctcgggcaggtgggagtgtgtcttgtatgggttctagagggaagctcataagcacttgtatgtgtttgcaaataagtgcatatgtggtaggcatgggaatgggtacactgtgagcccattttccaggcacacacctgcaggtgtagaagtgtgcacctgtgtgtggatctttgtttcatccacacacacaggcatgggagtgtgcacacatgtgagcctgtgttgcaggcacacacctgcagccataactgtgcaaacacaggccaggcgcggtagctcacgtccagtaatcccagcactttgggaggctgaggggggcggatcacctgaggtcaggagttcgagaccagcctggccaacatggtgaaaccctgtctctactaaaaatacaaaaattagctgggcgtggcggcacatgcctgtaatcccagctacttgggaggctgaggcaagagaattgcttgaacctgggaggcggaggttgcagtgagccaagatcacaccagtgcactccagcctgggcaacacaaagggagactctgtctcaaaaaaaaaaaaaaaaaaaaaaaaaggaaagaaaaagaaagcgtgcaaacatttgtgagcctgtgttctgtgcatatccacatatgtatttgaaagttagtgcacactcaagtcagccctcggagcctgcgtcccctcatggatacaccatgagtgtgtgaatgtacaaactgcctgcaccttggacattctctagggacagggagcaaggactgtccctgggtttcatctagaggaacaggaggtcccttagatgccctggagttggccccgcgcgaggggtgctgggagttgacaggaaagaggaagtggcagccgagaggccctggtggggctgaggttcaggaagagggcggggccctcagcccggacccaggatggcggaggccaataacccctcggagcaggagctggaggtggggtccagggtccctgtgggggcaggcagaagggggccccaagtggcacaggccagtagtccttccccgggtacttctcagtttgggaacaaggagaggagatggggcactggcctcagagttctctctctggaggatgagagtatccagtgcccttcggggctcccagattggggagagacagaaggaaggagaccgggctctgttctttagggtcccagttgttgaacataggagaagagcagatgagggtcttcaagaccccatagtttgggggtacagcagagagaagacttggcctgcccttgggataccctagttttgggggtgtagccaaggaaagatgaggcctgccctcgggatgccatagtttcagggtacaagtgagggaagatggggcctgtcctcaggaccctgtagttttaggggtacagcagagagaagacagggcctgcccttgggccctcttagtttcggggagcagcagagaaaagaaggaatcttcccttgggaccctctagtttgggggaggcagcagaagggagacagatcttattcttgagacccccttaatgtgggggacgctgtggtggtgggggtgacaaggccctgctcttgagacctcccagtttggggaggtcaggaagcagtggcaaggcctcgtcaccttccagttttgggagtcagaggaggtagagcaggccctgtcttgggagccccagtccagggcagaggctgggccaggctggctgcatgtggtctgcacctggagttctcctagctccactgaccctgttctgtcctccgcagagtgagcctcgcagctggtccctgctagagcagctgggcctggccggggcagacctggcggcccccggggtacagcagcagctggagctggagcgggagcggctgcggcgggaaatccgcaaggagctgaagctgaaggagggtgctgagaacctgcggcgggccaccactgacctgggccgcagcctgggccccgtagagctgctgctgcggggctcctcgcgccgcctcgacctgctgcaccagcagctgcaggagctgcacgcccacgtggtgcttcccgacccggcggccacccacggtgagctgggatgcctctggggatgcgggactccagggattccactgctcactggctcacccatggtctccagagccaggttaacccatctccacggacccccagggagatgcatgccatgacccccgtagccaccaacacccagagaggtgcatacagccacaccagcacccggtaacactcaagaccgtgcatgctgtcacatgaatacctctagacacagccacgccaacacccaggcaacattcaaggatgtgcatgcagtcacacaaacacctaaaaaaacagccacaccaacacccaggcaacacccaagggtgcacatactgtcacacgaatacctccagacacagccacgccaacaccccaggcaacactcaaggatgtgcacactgtcacacgaatacccagaaactcccacagttacatggatgataaccaaagactgtttatttttgtttttgtttggagacaggatcttgccttgtcacccaggctggagtacagtggtgtgatcaaagctcactatagcctcaatttcctgggctcaaacaatcctcccacctcagccttccaagtagctgggactaaaggcatacaccaccatgcctggctaatttaatttttttttttttttttttttttgtagagaaagggtcttggtatgccgccagggcttggctagaactcctggcttcaagtgatcctcctgctttggcctcccaaatgctgggaatacaggcgtgagccattgcacccagcctgttttttaatttaaaacatttttattggttttaacattttttttctttttgagatggagtcttgctccatcacccaggctggagagcagtggtgcaatctcagctcactgcaacctccacctcccaggttcaagtgattctcctgcctcagcctcctgagtagctgggactataggcttgcaccaccacgcccggctaatgtttgtatttttagtagagatgggatttcaccatgttggccaggctggtctcaaactcctgacctcaactgatccacccacctcaggtgatgtgcctcccagaatgctgggattacaggtgtgagccacctcactcagcagcttgaattttttttggtggggaaggacagagttttgctcttgtcacccaggctgaagtgcaatagcacgatctcggctcactgcaacctccacctcccaggttcaagtgattttcctgctccagcctcccaagtagctgggattataggcatgagccaccacgcctggctaatttttgcatttttagtagagacgggattttgccatgttggccagggtggtatttaactcctgacttcaagcaatccgcctgcctcggcctcccaaagtgctgggattataggtgtgagccactgcgcccggcctcagtcatttctgcacccagggtcccctcaagcatcacaccactctccagagactcatgcagacacatgcatccggatgtgccaacacccggagactcagtcataccaacctggagatctgaactcacagttgtagcaacagtcagagatgtacgcagagcatctcccaacacccacaatctcagacagtcattctaacacatggcgtctcacagagttacactaacacctagggaaacacacactcagccatgccaacaccctgcagctcacagatggcaccactcccacacccataggctcacacaagccatgtacgtagttactcatgggcctctcaaatgcagtggacccagcaccaaggacacactaacacacctgggtgctcgcctgcactcattcatcctgggttctgccccagccccgaggggtttccctgggagggtgggtgggtagactgctgggccctggtgtccccctgcctgcctgtctgctggcccccagctccccctcctccatgccccaggggcaatgcccaggctgggctgaggatgaagcctcccaggcaggccgaggtgaggatgcgtggtgactctctcccacctgtcgcctccagatggcccccagtcccctggtgcgggtggccccacctgctcggccaccaacctgagccgcgtggcgggcctggagaagcagttggccattgagctgaaggtgaagcagggggcggagaacatgatccagacctacagcaatggcagcaccaaggtgaggcagcacgtgcacacacactgtgtacacacaccacacctgtgtgcgtacagtccacccacatgtgcacacctacctgcatgtgtacacatgtgtccctgtgtgcacacgcccactcaaatgtgcacccacacctgcgcatgcacaccccacacgtgcacacccatccgcatgtgtacacacctgtccacgtgtacacacacccactcaagtgtgcacccacacctgtatgtgcacacactcactggcatgtactcccacatctgtacatgcacacacctacctgcgtgcatacacgctcacccacatgtgtacacacccctgcaaatgtgtacacacatatgcatacacccaccacacgtgcacacacctgcatgtgtacacacccttgaacgtgcacacacagctgcacgtgcatgcatacttgcacacacccacatgtgtgtataccagcatgtgtacatacaccccccatgtgcacacacacctgcacatgcacacacacctgcctgtgcacctgcacctgcatacacatttgcaatgcacatgcacatgtacacacccacacgtacacacccacccgtgtatctgcacacacaccgcacatgtatgcacatgcctgtgagcagatcacaggctgggggcatagggtgcagcctacagctgcccccatgggaggctgggagcctttggattggggacatactggctgatgggtgtaacttggtgtcaggactaaggcacaggcagctcatgggggcatatgggaagcatgactatgggtgatgtcagacagacgtggcaaattgtctcccctcctcccacagtcccctgcagagcctcaggcccatccacagtcagggcaacatgccgcctctcactgctgacggtgtgtcctgttacaagcacacacagtcatgtcataccttgacacacacacaccatcataacatctagacacacacacacacatgctgtcataacatctagagacacacagtggtaacaacatctagcaacacatggagaatcccaccacagccacatctggacacacacacacactcttacattcatacccagagactggtgcacagacacacacacatcccccgtcctgccaatcagtcccaggaacacacaggtctctatcaacacccagaaattctgacaccacaagcacaggccaacctacagctagaggattaatgtccagacccacaggctggtgtgcgcatgtccttccacgtgaatgtcacatgggaggacagactgcatggatttttttaatgacactattttatttattttttgagacagagtctcactctgtcgcccaggatggagtgcagtggcgtgatctcggctcactacaacctccgcctcctgggttcaagcgattctcgtgcctcagcatcccaagtacctgggattacaggcgcatgccaccacgtcccgctaatttttgtatttttagtagagatggagtttcaccatattggccaggcgagtctcgaactcctgacctcaggtgatctgcccaccttggcctcccaaagtgctgggattacagatgtgagccaccttgcctggcctaacattattttatttatttaatttatttttatttttattgagacaggggtctgtgttgcccaggctggactcgaactcctgggctcaagcattcctcctgccttggcctcccaaagtgctgggattacggatgtgagccactgcgccccatttatcaattggtggacatttggttgtttccacctttttagcgattgtgagtagttttgctatgaacacctgtgtacaagtatttgaacaccattctatgaaaatttaaaacctagatcaattgtatatcttttacatgtatctgagcgttatacaaaaaaagaataagagtttctcaccccctaagaatttctgccccccgccctgggggtaatactgacccagtgaaaatgaatagagtaggccaggcgcggatcccagcactttgggaggctgaggcaggcggatcacttgaagtcaggagttcaagaccagcatggccaacatggtgaaacccgagctctactaaaaaaatacaaaaattagccgggcgtggtggcacatgcctgtaatcccagctactcgggaggctgaggcaggagaatcgcttgaacctgggaggcagaggttgcagtgagctgagatcacaccactgcactccagcctgggtgacagagcgagattatgtctcaaaaaaaaaaaaaaaaaagctgggcatggtggtgggcgcctgtaatcccagctactcaggaggctgaggactccatggactacatcatgccactgtatccaggaatgcatggaagtacatttatttacttatttatttattttgagacagggtcttgctctgtttcccaggctggagggcagtgatgcaatctcagttcaatgcagcctccaactcctgggcttgagtgatcttcccacctcagccccctgagtagctaggaccacaggtgcacaccaccacgcccagctaatttttgcatttttttgtggagacaaggtcttgccatgttgcccaggctggtctttaactcctgagctcagcagtccacccgcctcagcctcccaaagtgcggggattacaggcatgagccaccgtgcctggcctgcaaatgcatgttgttacatccacatgtgaacactctgccacagtcacctaggacctgcatggtgtggctagaccccaaccacctagccttcctctctcagactgtctctgcctccaggaccggaagctgctgctgacagcccagcagatgttgcaggacagtaagaccaagattgacatcatccgcatgcaactccgccgggcgctgcaggccggccagctggagaaccaggcagccccggatgacacccaaggtgagtcccttgcttccaggcagcttagcctgcatctcgccttgcagggctcagcctccagctccataatgagtccctttctggggcagggaggtgggtcctgtgacccactgtgagacttcaacacattcctgaccctctctgggccagagcttcccattttgtcccatgcaaagtttggattacatcaggggttggtaaattaccaccttcagaccaaatctatccattgtcttttttttgtcaataaagttttattggtacccagccacgcccattcatttactatgtttttgactgcctgactattctgaataatgaccctggcacttggtcacagagagtcagacactcacagtcacactgtgtccacatgtgtcactcacctggacaccaataacacagacacagttccaaggaagttgatagtcacaggtatgttgccttataaacacagtctcggctgggtgcagtggctgacgcctgtaatcccagcactttggaaaccgaggcgggcggatcattcgaggtcaggatttcgagatcagcctggccaacatgatgaaaccctgtctctactaaaaatgcaaaaatcagctgggcgtggtggcacgcagctgtagtcccagctactcaggaggctgaggcaggagaatcacttgaatccgggaggcggaggttgcagtaacccaaggtcgccccactgcactccagcctgggcaacagagtgagactctgtctcaaaaaaacacacacaaaaaaacacacagtctcactgtcacccctagacctgctgccacatggcgctttatcagtcactgggacttttaggaataaagtcatccagtcacccatccttgcgacaacacccagagacaaaggaatgtgtgatcctaccatcacacatagtcactgtgaagtccatgtggatatccacagtacaggcacacaatcacgtgcaccgtcgcactgacacacactgcagggacacactttttttttttgtttttttttttagatggagtctcgctctgttgcccaggctggaatgcagtggcacaatctctgctcactgcaacctctgcctcccgggttcacgccattctcctgcctcagcctcctgagtagctgggactataggcgcccaccaccacacccggctaaattttgtatttttttttgagacggagtcctgctctgtcgcccaggctggagtgcagtggtgtgatctcggctcactgaaagctccgcctcctgggttcatgccattctcctgcctcagcctcccaagtagctgggactacgggcacctgccaccacgcctggctaatttttttgtatttttagtagagacggggtttcaccatgttagccaggatggtctcgatctcctgatctcatgatccgcctgccttggcctcctgaagcgctgggattacagacttgagccaccacgccctaccaattttttgtatttttagtagagacggggtttcaccatgttagccaggatggtctcgatctcctgacctcgtgatccgcctgccttggcctcccaaagtgctgggattacaggcatgagccaccgtgcctggctgacacactttttttgtttagacagggtcttgctctgttgcccaggctggaatgcaatggcgcgatcataactcactgcaggcttgaccttctgggctcaagcaatcctgctgagtagctgggaccataggcgtgtgccaccacacccagcttattaaaagaaattttttttttgtagagactaggtcttgcccaggctggtctcaaactcctgacctcaagtgatcctcctgccttaccctcccaaagtgttgagattataggcgtgagccactatgcctggcctgtgccccttttcttgaccctgtgcttgggcataaatgcatttgtgtctgtgactgtgtttctctgcccctataatggtgtccctgtgcccaagatgacagggccgtgtctgtgtaacagagtctgactcatgacagtgtctctatgtggcagggtgactacatctttgtgacagagtatgtgttcctctggtgatagtgtgcctacgctggtgacaaagtggtaatgccatgtgtccctgtgggcgacagtgtgacagtgtcagtgcgacagtgcctgccttactctccttgggccgccataacaaagtcccataggctgagtggcttaaacaacagacatttatgtttttcacagttccagagactggcagtcccagatcagggtaccagcatggtcggttcctggtgagggcgctcttcctggcttacagatggcttccttcttactgctccctcacagggagaaagagccttagtgtctcttcctcttcttatttttcattattagttttttgagacagggtcttggtctgtcacccaggctggagtgcagtggcgtgatcacagctcactgcagcctcgactttctgggctcaagtgatcctcctcgttcagccttctaatagctgggactacaggcacacgccaccatgcctcgctaatttattttttatttttagtagagacaaggtctctctatggtgcccaggctggtctcaaactcctggcctcaggtgatcctcctgcctcagcctcctaaagtgctgggattacaggcgtggaccactgcacccagcttcttcctcctccaataagcgcgctaatcgcatcatgatggccctccctccatgacctcctctaaccctaattacctcccaaaggcacttggagaagtccaagtgccatcccactggggattaggggttcaacataggaatttggtaggagacaaacattgagtctcttaacagtgtctttgtgactgacaccgtctgtgtaaatgtagtatgctgtggttgtccagatgtccatgagtgtcaccatgcctggttgactgtgtaacctggtgactgttcattggggaatgaggtgtgtcaacacgggtatgacagtattattatttttttttaatgacttagagtctcactctgtcacccaggctggagagcaatggcgcaatcttggcttactgcaaccaccgcctccggggttcaagtgattctcctgcctcagcctcctcagtagctgggattacaggcatgcgtcactgtgcccagctaatttttgtatttttagtagagagggtttcaccatgttggtcaggctggtctcaaactcctgacctcaggtaatccacccgccttggcctccgaaagtgctgagattacaggcctgagccgccatgcttggcctatgatttagatgttcctgtctgtttgggtgacagcccctgggtgacagtgtctgaatctagataatgtggctgtccctgggggccacaatgtgcctgcgtctgtccctgtgcaaatcactggaggtgaagagggaccgtgacaatgtgtgtgtcggtaagcgtggggtgacagtgtgcctgtgtgtcattgctcagactgtcccctgtaacagggtaactttttccctaggactggccctgtgagtgatggtgtttggataaaagagtctgggtggaagtgtggctgcctgcaggtgacagtgcgacagtgtcactgtgcctgccccttggatgaagcgtgatgcatcttcatgatggtttgtctgtggcccgtgcctgttcctgcgaatggctgtgtctgcgactaggttggtggggcgctgcaggctagcctcactgccctgtattccacgctcacagggagtcctgacctgggggctgtggagctgcgcatcgaagagctgcggcaccacttccgagtggagcacgcggtggccgagggtgccaagaacgtactgcgcctgctcagcgctgccaaggccccggaccgcaaggcagtcagcgaggtgaggggcggagctttcattagaggcggggcttcagcaaggggcggtgcttcagcaagcggcggggagttcaccaggaacacccacggtgaggggtggagcctcaaagggggtgggaccttcataaggggtggggcctcagccagggtagactactgtgaggggcagggcatcaggcaggaacagtgcaactgtgaggggcggggcctcagcgagggggcatggtttcaggcaggaatggccctcggtgaggggaggggcctctccaaggggcggggcctggttttcccagaggtgggaccaagttggtttgaggtttagccctctagggaggagctcagtgtgagactcagcctgggggtggggcctaggcctgcacttgggaaggggcaagcctggtcccgcccccagcccccacacttcccaccacaggcccaggagaaattaacagaatccaaccagaagctggggctgctgcgggaggctctggagcggagacttggggagctgcccgccgaccaccccaaggggcggctgctgcgagaagagctcgctgcggcctcctccgctgccttcagcacccgcctggccgggccctttcccgccacgcactacagcaccctgtgcaagcccgcgccgctcacaggtgggtctgagaccctaccccacccctgcagccctgggcctccgactcctctcatttccccattcctgtgacccccgacttcaatctccgctctccccaaccctggactcccattccaccactgtctcctcccctcctttgccctctgattctgggctcttgcccaccccccccacacctcagtttctccatctctcttcacctggcccagtatttttctcccagcccttgttccccagccccacctcggcctcacaacgctcagccatgagcctcctacccgcctgctgcagaccagccagccccaccttccacagacccctcagccatctacccctccagaccagccccaccgtagacccctagcccatcttagacctcagattgtccaccgagtcctcccctagaacccctagtcctaccctgttcctgcttgcctgggcctacggcctgtaccctgagcctacggcctgtaccctgagcctctcttctgcccctaaactcccgcatctgagcccctcctggaaggactgcttctctcatattctcctatcccagcacggacatcccggcctcatgccccatgctccattctggttgtccctcactggctcccacttgtaccatggctgcgtctggatgtgtcccctccccgctgtggtcccctccgctcagcctgccccagaagtggccccctgctgagctttcccctcctgcagggaccctggaggtacgagtggtgggctgcagagacctcccagagaccatcccgtggaaccctaccccctcaatggggggacctgggaccccagacagccgcccccccttcctgagccgcccagcccggggcctttacagccgaagcggaagcctcagtggccggagcagcctcaaagcagaagccgagaacaccagtgagtgggcatcgtgggccctgagaaacgaggtggcattggggacctggaatgccccatatttgtaaacctttaaaaaataagccaggggtcgggtgtggtggctcacacatgtaatcccagcactttgggaagccaaggtggacggatcacttgaggtcaggaatttgagaccagcctggccaacatggtgaaacactgtctctacttaaaaatacaacttagctgggcatggtggtgcacacctgtaatcccagctgtttgggaggcttaggcaggagaattacttgaacccgggaggtggaaattgcagtgagccatgatcacgccattgccctccagcctgggtgacagagtgagactttgcctcaaaagagaacgaaaacaacaacaaaaacaaaaaaacaggccaggtgcagcagctcatgcctgtaatcccagcactttgggaggctgagacaggaggatcacttgaggccaggagtttgagaccagcctgggcaacatagcaagaccctgtctctacaaaaaataaaatgtaaaaattagccagatgtggtggcccacacctgtagtcctagctgttctagaggtgggaggatcacttgagcccagtgagctatcattgagccatttcactctagcctagatgacagagagaccctgtctctaaattaaaaaaaaagaaaaaaaacttcaagtttatttagattaaaaaaaaggctgggcgtggtggctcacgcctgtaatcccagcacttggggaggccgaggcgggtggatcacgaggtcaggagttcaagaccagcctggccagcatggtgaaaccccatctctacaaaaaatacaaaaaaattagccaggcgtggcggcgcgtgcctgtaatcccagctactcgggaggctgaggcagagaattgcttgaacccaggaggcggaggttgcagtgagccgcgattgtgccaccgtactccagcctgtgcaacagagcaagactccatctcaaaataataataataataataaataaataaaacaaatttaaaaagaaaggaaaaccaaacaagaaaccaatatatcatattcattaggatgactaatactattttaaaaacccaacaaaacaaacagaaaataagtgttggtgaggatgtggagagaaatcagaacctttgtgcactgttggtgggaatgtaaaatggtgcagccctatggaaaatatattggcatggccgggtgcagtggctcacacctgtaatcccagcactttgggaggctgagggggccagatcacctgaggtcaggagttcgagaccagcctggctatcatggcaaaaccccgtctctactaaaaatacaaaaattagctgggcatggtggtgtgtgtctgtaatcccagctactcagaaggctgaggcaggagaatcgcttgaacccaggaggcagaagttgcagtgagcttagatcgagccactgcactccagcctgggcaacagagcgagactctgtctgaaagaaagagagagagagggagggagggagggaggaaggaatattggcagttcctgaaacaagtaaaaacagagtaagcagtccaggcgcaatggctcacacctgtaattccaccactttgggaggtcaaggtaggtggatcacctgaggtcagaagttcaagaccagcctggccatcatggtgaaaccccatttctactaaaaatacaaaagttaaccgggcttggtggtggtgcacgcctgtagtcccagctactctggaggctgaggcaggagaattgcttgaatccgggaggcagaggttggagtgagcagagatcatgctactgcactccagcctgggtgacagaatgagactccatctcaaaacaaacaaacaaacaaaaaaacaagagtaaccatatgatccaaagctacttctgggcatatccccaaaagaattaaaaacagggcctcggacattccataatgcatacatatttcaaaacaacatgttgtgcatgataaatatatataatttttatttgtcagttttaaaaatagtgatagaaaaatatttaaaaaaaaaaaaaagggtctcagagatatgtatacctgtgttcatagcagcattatgaaagccaaaaatggaagcaacccagatccaccaatagatgaatgggtaaacaaaacgtgggccagccatgcaatggaacattgctcagatttaaaaaggaaagaaatcctgccaggcgcagtggctcatgcctgtaatcccagcactttgggaggccgaggcaggtggatcacttgaggtcaggggttcgagaccagcctggccaacatggtgaaaccccatctctattaaaaatacaaaaattagccgggtgtggtggcacatgcctgtaatcccagctactcaggaggctgaggtaggaaaaccgcttgagcccaggaggcaggcgttgcagtcagccaagatcatgccaccgcactcctgcctgggtgacagagtgaaacactgtctcaaaaaaaaaaaaaaaaaaaaggaaaggaatcctgtcttatcctgcaacacggatgaatcttgaggacattagtctaagtgaaataagccagtccccaaaagacaaatattgtatgattccagttatatgaggttcctagagtagttagattcatagagacagaaagtagaatgatggatgccagggagtagagggagggggaatggggagtttattatttaatgtggacagagtttcagttttgtaaggtgaaagttctggagatggatggtggtaatggttgcacagcaatgtgaatgtacttaatgccactgaactggatggacactttaaagtgattatgatggtaaattttatgttacatgtattttaccataattttttttttcttgagacagattctcctctgctgcccaggctggagtgcagtggcaccgtctcagctcactgcaacctctgcctcctcggtttgagcgattctcttgcctcagccaacccaaatagctggtgggattacaggcgtgcgccaccacacccggctaatttttgtatttttatggagatggggtttcaccatgttggccataatttttttaaaagaaaatttgattcgtaatctcatggcaaaaaaggaaaaagaaagaaaattaatacgtatgtacaaaaaaaaaagggagtgtggagaagagtaacaggagagcagacacccatattaccaccacctgcgttaggaaatagaatatggcagccaggtgccacggctcatgcctggaatcccagcattttggtatttgtaggaggatcacttgaacccaggagttcaagaccagcctgggcaacatagcaagaccttgtctttacaaataatttaaaaattggggcatatggccaggtgtggtggctcacgcctgtaatcccagcactttgggaggccgaagcgggtggatcacaaggtcaggagatcgagaccatcctggctaacacagtgaaaccccaactctactaaaaatacaaacaattagccaggcgtggtggtgggcgcctgtagtcccagctactcgggaggctgaggcaggagagtggcatgaacctgggaggcagagcttgcagtgagccgagatcgcgccactgcactccagcctgggtgacagagcaagactctgtctcaaaaaaaaaaaaaattgggggtacatgtcatcaggccctcctgaatctgtgtcacagaaaaaaaaactaaagggaaaaaaagagaagacaagccaaccaaaaattaaccaggcgtgggcatggtggcttgtgcctgcggtcccagctacttgggaggctgaagtgggaggattgcttgagcgcaggaggtcaaggctacagtgagctgtgattgcaccactgcattccagcctgggcaactgagcgagaccccatcttaaaaaaaaaaaaaaaggaaaagaaatagaatatttccagctctccagaagccccctcttgtctcctccacaattccatctccttcctctgccatagaggtggctactctcccgacttttatcatttccttgctataatttgtagttgtagaaccccatgtttgcatccccaaaaacttttgtttaattttgcctggtattagaactttatattgacaggctcatacagactattctatcacatggcttctttcattcaacattgtttaggggctaggcatagtggctcatgcctgtaatcccagcactttgagaggccgaggtggagggattgcttgagccaaggaatttgaacccagcctgggcaacatggtgaaaccccaccctacaaaaaaatgcaaaaaacaaaaccaaactaaaaaaagcattgttttggtagactcatccattttgttgtgacaagctatagttaattcatatttattcctgtttagtaatccattatgttagactgagccatatcgaattgcctctttctgaaagcaaaaaaatagttaaatatcagcaatttcgtacttcagctactaagatggtatagcagttttaaaatattaattctcctgttaatggactgtgggatgcctctattttggactgttacatacactttatataaatgcatctcctgatgtatacccacatgcatttggctagggtaaatcctcaggagtgcctgggcgcggtggctcacgcctgtaatcccagcactttgagaagccaagaccagtgatcacttgaggtcaggagttcaagaccatcctggccaacgtggcaaaaccccatctctactaaaaacacaaaaattagctgggcatggtggtgtgcgcctgtagtctgagctactttggaagctgaggcacgagaattgtttgaacccagaaggtggaagttgcagtgagccgagattgtgccactgcactccatcctgggtgacagagagagactctggctcaaaaaataaatgaataaataaatccttaggagtatgtggctgggacttccatgtagaataaaattgaatttggatccctgcctcacatcacaccatgtaaaaaaatcaactggattaaaggcttcaatgtcaaatgcaaaactttacagtgggagaaaagttatggaggggaggattcattttaaaaagatagcagacagctaggcctggtggctcatgcctgtaatcccagatacttgggaggctgaggcaggagaatatcacttgaggccaggagtttgagaccagcctgggcaacataacaagactcatctctactgaaaaaaaaaaaaaaaaagaaaaagataatagacatgcccctttctgccaggattttctttctttttcttttttttttttctttttttttttttttgagatggagcttcactcttgttgcccaggctggagtgcagtggcgtgatctcggctcactgcaacctctgcctcctgggttcaagggattctcctgcctcagcctcccgagtaactgggattacaggcatgtgcaaccacgcctgggtaattttttatttttagtagacatggggtttcaccatgttggtcaggctggtctcaaacttctgacctcaggtgatccacctgcctcagcctccgaaagtgttgagattacaggcatgagccactgtgcctggccgtttttattttctcttctcttctcttctctcttttcgaccgagtcttgctgtgtcacgcaggctggagcgcagtagcacgatcttggctcactacaacctctgcctcctgggttcaagtgattctccttcctcagcctcccgagtagctggcattacaggcgcgtgccaccacgcccagctaattttttgtatttttagtagagacggggtttcgctatgatggccaggctggtcttgaactcctggcctcaagtgatcgcctgcctcaacctcctaaagtgccgggattacaggcatgagcaaccttgtctggctactgccagcattttctgactgggccctctctcccatttcaggtgaagtcagcactgtgcttaagctggataacacagtggtggggcagacgtcttggaagccatgtggccccaatgcctgggaccagagcttcactctggagctggaaagggtgagctgcgttggaggacagcagggcctagaggaggaggggttccatgcctctggcaccctgagtgatggccctcttcctctccctccaggcacgggaactggagttggctgtgttctggcgggaccagcggggcctgtgtgccctcaaattcctgaagttggaggatttcttggacaatgagaggcatgaggtgcagctggacatggaaccccagggctgcctggtggctgaggtatagcccacacctgaccctgagaaaatgcttcttctccctcactgccccattcccagtttcctagaaggggaaaatatgttttaggtctggctcttccagaaggggaagataagttttaagtcaggcttttctagaagaggaaaatagattttagatccagctcttctagaaacggaagatatgttttaactctgccttttctagaaggagaagatacgttttaggtcaggctcttccagaaggggaagagacgttttaggtctgcttttttctagaagggaaagatatgttttagatcaggctcttctagaaagggaagataggcttttgatctgcctgttctaggctgggcgtggtggctcatgcctgtaatcccagcacttcggaaggctgaggcaggaggatcacctgaggtcagggagaccagcctgggcaacatggtaaaaccgcgtctcaactaaaagtacaaaattagctgggcgtcgtggcacatgcctttagtcccagctacttgggaggctgagacaggagaatcgcttgaacccaggaggcggaggctgcagtgagctgagatcccaccactgcactccagcctgggcgacagagtgagactctgtcgcccaggagtctcacaaaaaaaaaaaagatctgcttgttctagaaggggaagatacattttagatcaggctcttttagaagcataagatatgttttagatatggtttctcttaatacagaaagatagttttagatcaggctctttcagaagtggcaggtatgttttagacccgtgtattctagaaggggaagatacattttagatctgtctctgaaccttgatagaaaagtacaccttggccaggtgtggtggctcacgcctgtaatcccagcactttgggaggctgaggcaggtggatcacttgaggccaggagttccagactagcctggccaacatggtgaaaccccatctctattaaaaatacaaaaattagctgggcatgatagtgggtacctgtaatcccagctacttgggaggctgaggcaggagaattgcttgaacccaggagacagaggttgcagtgagctgagatcacgccattgcactccagcctgggcaacagagtgagactcttgtctcaaaaaaaaaaaaaaaagaagaagaagaagaagaaaagcacttctaattagccacatcagtgataggaccttagctgggattggttttgttctgaggcaagatacttaaaaaaaaaaaaaaagaagaagaagaagctgatttccaaatttagaaatgtttaaagaaaaaaggaaataaattataaaatttcttccaaccaggaaagagatacaaaacctggcaacatatcgtggtgattgctaccagagccacagtcaagagaaagtgattccttccacagctgtgtgagggtgaaggtctgaattgaggtggcctacccttggcactgttgacatctggggccacatcatcctctgtggtggggctgtcctgcatactagaggatgtagcacctctccccactgcttacaggatgtcagtagcaccacctccccctgagttttgacagcccagaggtctccagacactgtcaagtgctccctggccgggaacccctggtctaaatgacatttctagctgagttctcatagtataagccaggctctgtagcgagtactttggcgacgtgaactcattaattctcacaaccaaccaacaaaagagggactgttattactcaaatttgacagaggaggaaactggggcacagagaaggggcacttgacccctcatttagccaaattatcctaaaaaactcttttaatcttccgctaacctatatgtgtaccccattttacatatatatatgatagattacctatatatgtatacacacacatattatctattatttacccacctacgtgtccatccatccattttgtctgtctatgcattcatccatccatcttttttttttttttttttttttgagatggagtctcgctgtctcccaggctggagtgcagtggtgcgatcttggctcactgcaacctctgcttcccgggttcatgccattctcctgcctcagcctcccgagtagctgggactacaggcacccgctaccacgcccggataattttttgtatttttagtagagacggggtttcacccaccgtgttagccaggatggtctccatctcctgacctcgtgatctgcccgccttggcctcccaaagtgctgggattaccggcgtgagccaccgcgcccggcccagccatcttatcaatgcatcctctatccattgatagatacacctatattatctgtcttatctatgtatccatctatattaggtatctatatcatctatttatctaatccatctatccatttatctatctctatctatatattatctatcaaccaatctatttttccatgcatccgtctctattatctgtcagtcatcttatccatcaatcttatgtatgcatcatccatccatctatccatccctgtatatttctctgtatatatatctacccattcctctctctatctctatctatccctctctatatctatctgtgcctctgtttttctctatatagctatatctatctatccatccatctatattatctatcaactaatctatctttccgtctacccatctgtctatattatctatccatctatattatctatctatcatcttatccatccatccatttatcttatctatgctcatccctccatccatccatctctgtatattcctctatctctatttatatccacccattcctgtctctgtctctatctatccctctctgtatctatctgtgtctctctctctttttctctcgatagctgtatctatctatccatccatctatccatgcatccttctctttctatgaatccctttctctatcagtccctctctctttctctatctgtaactacccttccgtccatgcccctctctatctacctgcgtctatatctgtctctttctgtgtctatttatccatctctctatatccatatccctaagcagaggttctcccctggtctgaccatcaagcaccagtgaaagaaaggggcggggccaggcacagtggctcacacctgtaatcccagcactttgggaggctgaggcgggcagatcactaagtcaggagttcgagactagcctggtcaacatggtgaaaccccgtctctactgaaaatagaaaaattagccgggtgtggtagcaggcgcctgtaatcccagctacgcgggaggctgaggcaggagaatcagttgaacctgggagatgaaggttgcagtgagccgagatcgcatcattgcactccagcctgggcaacaacagcgaaactctgtctcaaaaaaaaaaaaaagaaagaaagaaaggggcgtggagaagagctgactccagatggcagaggtttaaaattgttctcccattcagaacacagcccaaaccaaatggaaagtgatggtgggtggcctgggggacacattctaaagcgtttctccttgccttcaaggtctctctgtggcattctattttgtttttatgcctatacagaagcattcttccatagaacttttctgcagctctggccgggcgctgtggctcacgcctgtaatcccaatacttcgggaggctgaggcggatggatcatttgaggtcaggagtttgagaccagcctggccaacatggtgaaaccctgtctttactaaaaatacaaaaattcggctgggtgcggtggctcacgcctgtcatcccagcactttgggagggtaggcaggcagatcacctgaggtcaggagttcaagaccagcctggccaacgtggaaaaacctagtctctactaaaaatacaaaaatcagccaggtgtggtggcgcacgcctgtaatcccagttacttgggaggctgaggcaggagaatcacttgaacctgggaggcggaggttgtagtgagccaagatcgcaccactgtactccagcctgggcaacagagtgagactgtgtctcaaaaaaaaaaaaaaagaaattagccgggcttggtggtgggtgcctgtaatcccagctgctcgggagactgaggcaggagaatctctagagcctgggaggtggaggttgtggtgagcccagattgcgccactgcactccagcctgggcaacagagtctcaaagaaaaaaggaactttctgcagctctgttgtcgatgcacccacagtagctgagttctgttgtagatggaaatgttctctatctgaagtgtgaccagtgtgaccagggaaccaaagttttaatttcgctgacattttcactaatttaaatcgccacatgtgacaaccataccagacactgcagttctgtgacttcagcaccttctagaagttgtattggagttgggagaattcaacttgacaggtggcttccatagatgggtgggcaccagcattgcctgggggcttgttgaaatactgagtgctttagggccgggcacggtggctcgcgcctgtaatcccagcactttgggaggccaaagtgggcagatcgcttgagcccaggagttcaggaccagcctggccaacatggtgaaactccgtctctacaaaaatacaacaatttgccaggcatgggggtgcgtgcctgtagtcccagctactcaggaggctgaggtgggaggatctcttgagcccgggaggtggaggctgcagtgagccgagatcggactactcatatgtgcatatatatatgtgtgtatatatatatatgtgtgtgtgtatatatatatatatatagagagagagagagagcatgcgcgcgcttcctccactccatgtttctggctcagtaggtcaaacctgcgtttctagaaagttcccaggtgttgctgctactgcaggtctggggtctgggagcacatgtggggaatggggtgtgggatggcgtggcgtccgtttgcagtcgctgtctgtcagtcttgttgggtcagatgctctccccacctctagaaagggacccggttgtttgcttcttgcttttccaagacgtcccttcaggaggggagccatgggttgcaccgatgacctcttcattgtcacctggtactcgggttgaatctgatgccacgtgaccagaaccccacttgggcgcgcacacctgtgctcccaggggcttccttaccaagctgtctgcctgcaggtgggcagagggtcctcacattttggtcccttcccccaggtcaccttccgcaaccctgtcattgagaggattcctcggctccgacggcagaagaaaattttctccaagcagcaaggtgagagggtgctccaggcttcctgggggagaggccaggggtcctgggagtgtcatggagggtgacgcctgccccgtccccccagggaaggcgttccagcgtgctaggcagatgaacatcgatgtcgccacgtgggtgcggctgctccggaggctcatccccaatgccacgggcacaggcacctttagccctggggcttctccaggatccgaggcccggaccacggggtaaggaaggagggccccatggtcccggctgccccttgaagcctgcgagggtcctgggtcccagacacaccctcctctcgtctgctgcagtgacatatcggtggagaagctgaacctcggcactgactcggacagctcacctcagaagagctcgcgggatcctccttccagcccatcgagcctggtgagggtccccccttctatccccgtaggcctggcctgggcagcgtcaggggtcctgctccaggctcagagaccactaggaacttccctggagccacgcagcatgtctgtggcagaaccagggcccagatctctatgctggttaaaacgtgtgcccagatccccatcctggttaaaaaactgctcatgcctataatctcagcacttctgggaggctgacatgggaggattgctggagcccaggagtttgagaccagcctgggcaacacagtgagccactgtgagccatgatcctgccactgcactccagcctgggcaacatagcgaaatactatctcaaaaaacaaaacaggctgggcacagtggctcacacctggaatcccagcactttgggaggctgaggcgggtggatcacttgaggccaggagttcaagaccagcctggccaacacaatgaaaccccgtctctaataaaaatacaagaattagccgggtacggtggtgggcacctgtaatcccagctacccgggcaactggggcaggaggatcagttgaacctgagaggcggaggttgcagtaagccaagatcataccaattgcgctccagcctgggcgacagagcgactccatctcaaaaaataaaaataaataaaactgtgagctcagcggctggaccccctgggttcccacccctgccgtgccacctcttggctctgcgcttcacctctgtgcctcagtgtaccactttgcaaaacgagcatatttaaaactcatgtcaatgatagaatgatcgagagagtgctgttctctaggcagaggttaccgcaagctgggagccacaaggggacctgccgggtgatggaaatgttccttatcttgatctcggtcagaggtcagcacgcgttttccagaaagggccagagagtcaatatttttggctttgtgggctagacagtccctgtctgctttgtagtttgaaagcagccacagacgatatatgtacactgtaagcgtgtctctattccagtaaaaccttattggtagtacacgcggaagtttgaacattgtagaactttcatgggcaatgaaatattattcctttttttgtttttttttattcccccaacgatttaaaaatgtaaaaatcagtttacctgtggtcccagctacttgggaggccgaggcaggaggatgacttgagcccaggagttggagtctggcctgaacaacatggcaaaactccatctcttttttttttttttttgagatggagtctcactctgttgcccaggctggagtgcagtggcgtgatctaggctcactgcaacctctgcctcccaggttcaagggattctcctgcctcaaccacccgagtagctgggactacaggtgtgtgcccaccacacccagctaatttttgtatttttaatagagacggggtttcacctcgttggccaggctggtcttgaactcctgacctcagatgatctgcccacctcagcctcccaaagtgctgggattataggtgtgagtcaccatgcccggccactgcatctcttaaaaaaaaaaaaaatagtgaaagccattcttagctcttacaaactataaaaacaggctggcccaccagccagcatttgccaactcctaggctggctgatggtttcctgggtggatgcatatgtaacctgttcctcttgcccacctcactgaatgcattttatttatttatttattttgagacagagtctcactctgtcgcccagaatgggcgttggaatgcagtggcgtgatctcagctcactccaatctccgcctctcaggttcaaagatgcccatgcctcagcctccctaatagctgggactacaggcatgtgccatcatgcccaactaatttttggttttagtagagatggggtttcaccatgttggccaggctggtcttgaactcctgacctcaagtgttctcccctctgcagcctcccaaattgctgagatacaggtatgagctactgcacccagcctgaatgcattttatcttttatcttttttttttgaaacggggtctcgctctgccatccagggtggagtgcagtggcgcagtcatggctcgctgcagcctcgacctcctgagctcaggtgatcctctcacttcagcctcccaagtaactgggactacaggcgtgcaccaccacacctggctaattttttatagatctaattttttagaaagtagaagtaatgggttgggcatggtggctcacgcctgtaatcccagcactttggagtcaagagatcaagactatcctggctaacatggtgaaatcccatctctactaaaaatacaaaaattagccgggcgtggtggcgcacgcctgtaatcccagctacttgggaggctgaggcaggagaattgctggaatctgggaggcggaggttgcagtgagctgagatcacaccactgtaccccagcctgggcgacagagtgagactcagtctcaaaaataaaaaaaataataataaaaaatggacattgtcaagccaggcatgatggcttgcacttgtagtcccagctactcaggaagctgaacgaagaagatcgcttgaggccagaagtttgagaccagcctgaggaacagaacaagaccccatctctacaaaaattaggccgggcgcggtggctgacgcctgtaatcccagcactttgggaggctgaggcaggtggatcacctcaggtcgggagttgaagaccaccctgaccaacatggagaaaccccatctctactaaaaatataaaaaattagccgggcgtagtggtgcatgcctgtaatcccagctgtttgggaggctgaggtaggagaatcacttgaatccgggaggcggaggttgcagtgagcgaagatcacaccattgtactccagcctgggcaacaagagtgaaactccatctcaaaaaaaaaaaaaatgagctggacgtggtggtgcatgcctttagtcccagctactcaggaggcggaggtagagttggaggctgcactgagctatgactgcgcccctgcactccatcctggaagacagagcaagaccctgtctctaaaaaaaaaaattcaggttgggcatggtggctcacgcctgtaatcctggcactttgggaggccgaggcgggtggatcacctgagatcaggagttccagaccagcctggccaacatggtgaaaccccgtctctactaaaaatacaaaaattagccagccatggtggtgcaggcgtgtggctggaggagagtgagtgaggggctgcgtgggaggagaggtgaggacagagaggtcgggggcagatcttgcagggcctcggaggctgctgtggttatgagggcatctctgactccccttactctggcctcctctctccgccacagagctcccccatccaggaatccactgctcccgagctgccttcggagacccaggagaccccaggccccgccctgtgcaggtgacaccactccctggccccctgtccaccacccctgcccgctgtccttgttctcaccagtggcctctctccacagccctctgaggaagtcacctctgaccctcgaagatttcaagttcctggcggtgctgggccggggtcattttgggaaggtgaggtggagggcagggaattgggagaccccccaggtccctggctggccgctaaaaccacccctgcccactgtggttccaggtgctcctctccgaattccggcccagtggggagctgttcgccatcaaggctctgaagaaaggggacattgtggcccgagacgaggtggagaggtggggacctgccgtggtcctctggggacctctttcttctcttttgggaaatgacagagcagttctctccttggagctacagggagagtgactcatagtagtcactaacgccaggcacagtggctcttacctgtaatcccagcactctgggaggccgaggcaggtggatcacttgggctcagaatttcaagaccaggctgggcaacatggtgacacccccatctttacaaaaaatacaaaataattagctgggtgtggtggcacatgcttgtagccccagctactcatgaggctgagataggaggatcgcctgagcccagtaggtcaaggttgcagtgagctgagatcgcgccactgcactccagcctgggcaacacagtgagaccctgtctcaaaacaaaaagtcactaatacctactagcctaataccaagataataatagctcttaggaaagttattcatttgttcctccatgtagccctataagataaatactgatggcacagagaggttcagcaatttacccaaggtcacacagccagtaagcagcaggtccaggattcaaagctagagactcaggctctgaagcctgtgccctttgtggtgccaccatactgcctctgctttagggtcaggttcctgggttcaaatctcaattctgcagcatgggcttggagatcctggggaggtcacttctcccttcagaacctcagcttcttggctgggcatggtggctcacgcctgtaatcccagcactttgggaggctgaggtgggcagatcatctgaggtcaggacatcgagaccagtgtggccaacatggtgaaaccccgtctctactaaaaatacaaaaatcagccaggcatggtggcgggtgcctgtagtcccacctacttgggaggctgaggcaggagtatcgcttgaacccaggaggcggaggttgcagtgagccaagatcgcaccactgcactccagcctgactctgtctcaaaaaaaaaaaaaaaaaaaaaaaagaacccctcttgttgtggagaagcagaatgctattgccttccacacatggttgtcaggtgctctctacacagtgcctaacccctctaaacattcggtacaggcactgagattgtgcctggtcttcccagcatccttttgataatcaggaacccaactgagaaagactgaaacaagtaaagaaatttattggtctggatctgaaaagtccaggagtgtgctaccttcaggcatggctgtatccaggtgctgagatgacgtttctcagttctgcttccctctgtatgggctttggttgccatctgggagtctggagtaagtggcggccatggtctctgacttctatcccccacccctccccagcctgatgtgtgagaagcggatattggcggcagtgaccagtgcgggacaccccttcctggtgaacctcttcggctgtttccagacaccggagcacgtgtgcttcgtgatggagtactcggccggtggggacctgatgctgcacatccacagcgacgtgttctctgagccccgtgccatgtgagcctggaccccagcccgggcccctgcctcccctacagcatctgacacttagtccccccgagaggctggcagcctgcttctcacccctccaccctcaggccttgcttccctcagcctcccagagctttggggagactggggggcttttgaggatgtggaagccaggcttatgtgaccctccctccttgcagggtggccccacccctctcagcagcctctctctctctgcagcttttattccgcctgcgtggtgctgggcctacagtttcttcacgaacacaagatcgtctacaggtgtgtgcgtgtgtgcatgcatgtgcacactgcccgttgtggggacaggacccagacccccgctcatccctctttccacccctccaacccccaacagggacctgaagttggacaatttgctcctggacaccgagggctacgtcaagatcgcagactttggcctctgcaaggagggtgaggggctggcctctggattagacaaaggagggggaaggaatggggtccctaaccctattcggggtgccccccaccctgaccctgggacagggctggctgtgtggacaaccccacattgggctgagtgactcctctggcccccataacctcacatggccttgctgtccccagggatgggctatggggaccggaccagcacattctgtgggaccccggagttcctggcccctgaggtgctgacggacacgtcgtacacgcgagctgtggactggtggggactgggtgtgctgctctacgagatgctggttggcgaggtgagaccccgcccctgtgtgtctcggatctcattggaacctgcgcgtgcccagggtgggatccaagtctgcctccaccatgtgttgtgtgattgagggctgctggctctgcttccctggcctcagtttccacatctataaaatggggcatttccctgcccaagtaagccagcacccaagagctgcagcagagtgtggggctcaggccgggctgggtttggagcagccagaggaggggcctcgttcaccccgggcctccctctccccagtccccattcccaggggatgatgaggaggaggtcttcgacagcatcgtcaacgacgaggttcgctacccccgcttcctgtcggccgaagccatcggcatcatgagaagggtgaggacccccgacgtggggcgggcctggggaggggcagtggggcccaggaggggacagatcctgacacagtgctccttcctccaagctgcttcggaggaacccagagcggaggctgggatctagcgagagagatgcagaagatgtgaagaaacagcccttcttcagggtgagattccccacaaggacctcagtgaccccggccctcccccagggccgattcatcaccccacagcagacggcccccatgcctagccgctttgcctcaagggcctcgttgcgcctcaagggcctcgttgcacctccagggcaacatcgtcacctcctttgacacccccatttccctcctccacttttgttccccccaaggaccctcctaatcccacatctccacttttcccttttttttttttttttagccagggtctcgctctgtcgcccaggctggagtgcagtggctcaatctcggctcactgcaacctccgcctcccaggttcatgcagttctcctgcctcagcctcccgagtacctgggattacaggcgtgcaccactccaccacaccaggctaatttttgtatttttagtagagacggggtttcgccatgttggccaggctggtcctgaactcctggcctcaagtgatcctcccgcctcggcctcccgaagtgctgggattacaggcctgagccaccacgccgggcctccacttttcctaatccggcttctccaccaggctctcgcaggtgatccctcctgagccccagtccccccaccccacttgtcctctgtatgctcactcctctccgtggtccccgagccccaggactggtccccactgcagcacgccccctcctcagcctccaggctgaccctcccctccgcttccctcccctgcagactctgggctgggaagccctgttggcccggcgcctgccaccgccctttgtgcccacgctgtccggccgcaccgacgtcagcaacttcgacgaggagttcaccggggaggcccccacactgagcccgccccgcgacgcgcggcccctcacagccgcggagcaggcagccttcctggacttcgacttcgtggccgggggctgctagccccctcccctgcccctgcccctgcccctgcccgagagctcttagtttttaaaaaggcctttgggatttgccggatccttgcatcctccgtgtcttcttgtgtgcagtcattgggggtgggggcgtgcttggaggtgtggacgtttgcggggcaggtggctgggtggtcgtgggagtctcgactgatgggggtgtcatctgaagaggatcaaggggcggcgtggactcggggctgttcttatggtggggagcgtgggtgagccgagatgggagggggcgtcgggattgtgttggggggcgcccaggggcgtggggcaaaatggtttggggatagggttttggggctgtattggaagagctcaaagccgcagtgagcagaatggtttcggaagtccgttagggcagcggcaaggtcaggaaacgccccacacaccctctgtctctgctcccagcggagccccagccccggccgcccgcacggtgcgcttgctcctgcggctctggcgcccacgggcccggcaccctcgaacctcctagaaccgcgcccccgtgtctccgcgccctcttctggtaggccccggaactgcatccaccctggaggcgcacgcggcgtccctgcagccccccgcgcggccccagtggatgccgaagccccgacgggacacacggtcctgcctgggctcgcagaatggctttttattcccaaaggctctgcgccgcgcacctgggcccagcccagggtgggctggcttagtcgttgggcctctggttgtgcttagaagtggctgaggccgctgtgccgggagctgcgcagcgagctggcctcccaggcgctcggtgttaggcccagccccgcggggccgcccttggctccggccctcgggggcaagaggcgaagcagttggcgcagcacggcctggcgcagtaggatgtacacccaagggtccaggatctggttccaggaggcaaggcgcacggccaggaacagtggccgctgcagggaggtagagctccagccgccgacggccagcgccaccaacacctgcgggggaagccggtgtgagctatagagcaggcgcgggcgcaggggggcgcagggatggtgggggcgtggctggaaggtaaaagcctgggaggaggggcgagccgtcgcagggagggtaaatggggatccagatgagaaacggatgcggaaaaaaaaggggggcaaagaaacaaacaccttcagtgggtgggggtccggccgtagaggagtctcaggtgtcccggaaagaggaaaagcaagggggttgggtgaaaggactagggaatgaagcgcggcgacttataacggtggggcaggagaggaggcttgtgtgggtcggggtgcgctacaaagaccccaaaaaggaagaggagaggggggctaggaggaaggatgggaggtcagatggagaaggcgatgctggctttcggggcaggtggggcctctaggggccggggccttggttgagtccaggatggaggccccaggtgtcctgggacgacaaagggcgggagggtgccgagagggagcgggaaggagcgtggctcgaggggccggtgcgcccctcaccagcattgggctccagcagatgcacgacaccaccatgataccgacaagctggcccaccatctccacgtcgtgggcgcgagctctgcgtgccgagccgctgctccgagagccgccaaagaaggtggaggccgaagcgatggacgaggcggacgaggcggaggccgagcggggtccgtgcgccccccagcgacgccggctgtcggggcctgaggccgggggaggccgtcgggagcggcgtcgccagcgggcgcgtagcagggccaggccgctgagcgtgttgcacaccagcgcggcgaggagcgcgaccaggccgaggctggcgaagaggccagcaagcagtgcctggcgccagccgcccgggggacccaggccgatgaagcaccacgtgcccgggtactgcagctcatagcggcccacgcgcgccagcggcagcagcgccacggccaaggccaccgcggccaccgcggccagcgccaggcgcgcgcgggcgaccgagacccgcgcggcgtggagcagcggccgcgtgacgcccacgcagcgctccacggccatgccacagcccagcagcagcgggcacaggccgaagaagaccatgcagccgcccaggaagtggcaggccccgccggccggagcgcgccccgcagtgtacagacgcagcaccagcgcgcccgggatcacgtggcccgccaggtcggtggccagcaggctggccacgaacagcaggaaggtggcggccgagcggcggcgtcgcaggcggcccgcggcctgcgccagcagcgccagcgccagcaggttggacacggcgcccagcgtcatggagaagatgggcagcgcgggcgaagcgcccgacggcggcacggccgacgtgttggggacccagggcgccgcgcatgtggtcgcctcgcccgccaggctcaggttgaggggcccgcaagggctcatgtcaggcgccaggggtgctggatagaggagaggagggcagagtgaggctggctgggcccgggcggggaccagcccacggtgccatctcagaacatcagggcctgtttgactccatggcgttctcaggcggcccctctgcccatggcagttgccatgggcaactccaaatgacctggccactccatttggaaacccttctccctctcttttgcctctcaccaccccatctcctgctccagggcctccctctaaccccactggccctttctctgcccttcatggtttcctgcaagattccccccagccccgccctcaggcatctctgccagtgcctccgacccccaccttccatttttacacccagcaaattcctggggcctgtggctccatctgatagctctcacccatttctgccactgtggccctacctgactttccccatgtcagctttactccagtcccatcctcgatgccccagccccatctctaccaccacgggcacatctctccccacggccatgtccctgtcccccatggacccatctctgaccccacatggcacagccacatctgtgccatggacccatctctgcccctgccccatggacctgcctctgctccactgcggtctctcgccaggccctaccccgatcacctctgcctcaccctgggtgcccacggttccactccatatccctgccccagaggcctggaggcggccccacgaccatccactctttgatatcctggtggtgagggctgaaagggcggaactgcccaccaggccagatgggaagggaggatggacagacggtaagacagggacgcacagatcagggagaagagcccggggacacaggacggacagcaggtggccatggccccaccccttcatgccctcctcctccccaatcagggaccctcatgtgcaacccccttacccggcactgcctgggatgtggggtccccatcaccggccgctcagccctgccgcccactgcgccctggctctccggcaagccgcttcctccctccctcttcctggggcggctcctcagctcctcccgccgcccttgctggcctccaggggccgctccaccccgcgcacgcccgctgggggcctggagtggcagagacccccctctctgctcctggcaatgggcgggggccactctgggccccagcggctccctccacgaggagtgaggctccctggagttggtctggccccatgtgaccccctcctcccagcagggcgggagcagcccccttcccccccaggatcgggcctcttgcctcattaataaagcggataaaatctaaacactggaaaatgtgagcgtcgtctggggcgggctggggcagctgcagggggtgccactgcccccctccctggggctttggagctagagaggctaactccaattctgtggggccagcaatgccccccctgccctgccaaagccttcgtggatgtcggggtgggtgctggtgggcagggcctcgggtagaccagcttgggtcaggcccagcctggccaggggatccgcctatttatacaggggcttaagccccggctagggccacagcgagtcatatcctgggaggaggctgaaagggggcaggggaaccaggaggcctggcgacctggggactctccccagtgactggctcctttaagatgggctgagtgacacctgtgacacacgtcctaagacacaaagactcgcctcctgccctgagaagtagggtcacactggcacagcctcacaccctaagacatacaatcctgtcacttaccactcagtttcatcctgtccccatctcagcacagccaggttgctgccgccacatccctgaactcagggtcttacccccagcgccgggacgcacccagagttactgcctcaattccagcccctcccaacaccccaaaatgcagccctctgagatgatcacccgaaccaccctccttagtgctgggaaatagggtctcacttggcaccccgagagatacacacacgcacacacactccttattgccaaaactgcccctgaccacactctgtttgactttcaatgacccctcaacaatcccagacaggccccaccagcacactccgtacacccaaggcacaagaagtgacaccccccgccgctggacaccagagacctagctggccacccccaccctcacccagaaacagcaacgccctgagacacacacacctgcacccctagagacccctagacctagccagcacccccacccaggaaacagcaacaccccgagacataccctgacacccctgaacaccccaaggcctagccaagcacccctccttgccccagaaacagcaccctaagacacacacccccacaccccgggacaccccaagacacagtcactccgttgcactccccaccaccagacactgccagttacacctgcaattgccctggaacacagagccggttatcacatcccttacccacgacacagccctccctcattgcgtcacgagccatcaacactcttgatagactcacagtgctacccaacacccgagacacacatagccacaccccttcaccaccgcaagcggctcccagcacagacacctgaggagcccacaggtgcccggggatgccctgagtcaccaggactgcggctccccgactccacccgggtctgtccaccaacacccagcccccagggtcttccccttttcccccttcccctcttcctggtggcccagtgcccgcccgccttttggaacgaggattgcaagctggcctcggacttccccacagcctctcggctcacccccaagcattcctgtggggccttctggcccagcgccccttgcttcaatcccttcccttccctccaggtctggccagggtcccaccccgcctttccctgatcaccctcaatcctcgaagatgagtgggttgtcaaaacaagtatgctgggtttatgtctaggacaaagcagggtgccccatggacgcctgcgtgtccagcattgggccgggtggggtgggggctgcctcacgcctgcccccaacctcccggtgtaggggtggggctctggcaggcctgaggttccatctttctatttccaagccaggtttcaatgccctggtgctccccacggtccgggggttgtcaccagctgcagacagcagccttgtgaagctccagggggtaggaggccttgtgggagagggggcaggatttgaaccctcagtagtccaggaagctctggccctgcctggaagcctggtggcctgcagccagaaggaacagtgggagggggcaggtggcttggtgccagctcctaattcaatttggagcctgcggaagatggatttcagctgctgaattctttctcagccccaatcttccccctctcccaccccgaagccacacaggtccaacagcagatagattctttatgttcaagacagcaaattcagatacaaaaacccaccgccatcgtccctccctccctcctgctctgggccagggatgggcctggaaggagagatgggaggtggggaggaggttgcggggttcacagcagactcgtgtcaaatgcggaggtaacaggctccacagggagggggctcctctcaggaggggtgagggcattattgcatttgctggggggaaggacaaccctctcccctgtattccctgcgtcaggaaactaggaaggtcatgacccccaaacagaacccaaggccccagggagacagagggaccagtttggcagctgatggtggaaagtggtggaggcgggggtggccgcccaatttggctgatccctcccctccctgtgcctgacccagctgaggtaggtggggaacagggcacaggggggccggggaccccggccagactgggaaccagggaggggatggtaccgattggagcggggcagggggcctggccccacctcccctcaccatcgtccttgggctgctgagctaggctcaggctggaggctcgggtcctgacgtcagtgtccctgctgggggcccccaccaggttgcgcccgggtcatcatcgcagggtccgggggcagtcctagtagcggccgaccttggcgtccccaatggcgccccagacgtcaaagacgaactcgtcagggaaggcaaagtcacccagccgttcgtccagggcctcggccagctcatccgggttccttttgtcctttcccagctccaccatggtggccgctattgggggaggggtcagaacggaggcacaaatgacaccagggaccaaggggctcagggtggattcggcccccagcagacctagatgccccctcccccaggcagccctcactcacccagctccgtgtccctgatacccatgtaactctccagcaggtcatccaccttctcaatggccttctcttcaaaggcagagggctgggggccagggaggggtgacagcgacatcataacaatgtgaatatacatagtaattggacggactgccattgtcaccactttacatatattcgtatttagacctcaggacaaccctgagaaggtggtatcggtgttcagctcatccccattttactgatgggcaaactgcggcccatgtgcccaaggaaggtccctgggagctgggaagtggcagaagtggactagaatccaggctgtctgcccagagtcccctcagctaacaggtaatgctgccggttatgaaaaggaagggagggctgggcgcggtggctcatgcctataatcccagcactttgggaggccaaggaggctggatcacctgatgtcaggagttcgagaccaactcctggcctggccaacatggtgaaaccccatctctactaaaaatacaaaaatcagctgggcatggtggtgggcacctgtaatcccagctacttgggaggctgaggcaggagtatcgcttgaacctgggaggcagaggttgcagtgagccgagattgcaccactgcactccagcctgggtgacaagagtgagactctgtctcaaaaaaaaaaaaaagaaagggaagggatgccggagatagggtccggctggagcactcaccagatcctccaccgtggcggggccccgggatcggagccgcagggtccctcggccagtgcccagttgtgggccagagccagggcggccacccgctgaacgctggctgatcatgtctgtgggaggcaggagaggagtgagtgtgggggaagcttggttttagcacgttctgggcaggaacttgtccttcctggctttcaccaccaccccaaacttctccaggcttctgcaagtttctgggggctggggccggggtgatcccaggagggcaggaatcctgactcaggcctggcatggatgtggggcagagcagggggaacagctgggggccaggaataggaaatgctggaggggagactggaggggccacttctgctcccaggggctgggggacaggaagcaggtgtaccccagcctgagtctccagctgcctgagtccgtctcctcttggccaagggggtatggctgctgggccacagaccagccctacctgcccagggaagtgatttagtcccccacccccacctcaggggcctggggcccattcctgagagttagtgaagccagatggaaaagtgggggggctggcactgagcagtcaagcctggcctgttggggatagggggctggccagggctgagggcgcttggctgggctaatggcccctggaagctaggtgtgagggcaacttcctcctcgcccccgcccttctcccaggctgggccaagggccagcaccccgtctggggtcgggaggagctgcaaccccttccctttctgcaaccccttccctttcggcaggccaggcttgggcgccacctgctggccgctcccggcaccaccgcctgcgcccatgcgagcagcgccactggggaggtccagggggcggctcctcaccgaaggccttgcgaggctccgtgagcttcagcgtgaaggtacggcctcggggcagctccttgagcagccgggccacctcgtagtgccggcagcccagcaggctctgcccgttaatggcctcgatcatgtcgcccacgctgatgaggtggatgtggtcgatcacgctgccctccttgatgcgctgcgggggcggggagtcatcagcccttggggctctgccctggtttccggggtcccatggcccaccctcactcccaggcctccggggtgccccgtctccccaggcaccttgatgaaggcgtagccagccccgttgtccgtgatggtgagcccgagtgcatcctccgacttgaacacctccacctccttgcgctgccccttcacgtgggcgaagatgaagtcctccagcccgatctggccccccaggagcttgtccatgtccactttgtgggtgttcagggtgcagaacatcacctgcaggggtgggagacgctgaaacctcttccccctccctcccccttttctaatcaccactggagggcgaagggagagagctgggagaggactagggggattccatcccagtaactcatcacccactgagcctgagccagggccacagcagggcccacattagcgtgtcagctctgctaggactaggatttagttttcctttctctttttgagacagggtcttgctctgtcacccaggctggagtgcagtggtgccatcatagtcactgcagccacaacctcccagattccggcaatcctcccacctcagcctcccaagtagctggaactacaggtgctcgccaccatgcctggctaatttttgtattttttgtggagatatggggtctcactatgttgcacaggctggtctccaactcctgggctcaagtgatcctcctgtctcagtctcccgagtagctgggaccacagacacgtgccaccacacccacatagttaaaataattttttttagagatgggagcctcattatgttgcccaggctggcctggaactcctgagctccagtgatccccccatctcaacctcccaagtagctgggactataggtgtgcaccactgtacccagctaggatttcggtcctagcaaaaattcattgctgtgccaggtgcggtggctcacgcctgtaatcccagcactttgggaggccgaggtgggcagaacacgaggtcaggagatcgagaccaacctggccaacatggtgaaatcctgtctctactaaaaatacaaaaattagctgggtctggtggcgggcgcctgtaatcccagctactcgggaggctgaggcaggaaaatggtttgaacccaggaggtggaggttgcagagagccaagatcgtgccactgcactccagcctggtgacagagcaagactccatctcaaaaaaaaaaaaaaaaaaaaaaaaaaaattcattgctgctttcagggaacggagcctggcacacagtgagtgctcaggaaatgcttgtggaggacacagaaactcatcccacttagggagacccctgcgtctacttcttgctcaaacccactattgccctccttgaccccctcccatctatccccacagtgcttggcaccaggcaagcctgcctcccacagcgttgagtttctccaaggcatcacggagaagtgcatctcgtatctggcctctagcctccaccatctcatggggcactggcctcccaatgcctgacaggaactcagcatccagccctggccatcagctcccacagtctgtagaggtgcaggcctctcagtgtctgatgggaactcagcatttaactgtggccatcagctccccacaatctactggggtgcaggcctcccaacgcctgatgggaactcagcgtccagccctggtcgtcagttttgcacaatcgactgggatgcaggcctctcaatccatccatccaatcaatccatccagccctggcctcccacagtccattggagctcaggtctctcagtgcctgttgggaactcagcatccacccctagtcttgcacaatctactgggggtacacccctcctaatgcctgatgggatgtcagcatgcagccctggccatcagctcccacaatccactggggcacaggtctcccagtgcctgatgggaactcagcatccagccctggcctccagttccccacaattcacaggggcacaagcctcccagtgcctcatggggactcagcatccagcccaggccattggcccccaccactgagtggggcccaggctcagcatctgcagcttcagcatctgagccccagctcatgaacaggatgcaggcccagacctctggtccaccatcagggaccctggtgcccggctccccagtggatacctcggcagttggcaggcggaaggcctcggcgatcttgccatacagctccttgacgttggtgaagccctcgatgcggccagtgggactgccatgggccagctgggtgtggaacacgaggcggggccgcagggctgggggaggggggggcaagcccatttgggggccccccgacccacctccgcccagaggccctggctcccccacgcccagccctccacggcctggctcagcctcctcattttccactagagggggcgcctttttccgccgccccagtcccagcggcatgagcagcgagaagtggggtcaccagaagatctgcaggacaggaagtggggctcagggcctgggcagaggccttgggtgcccctcccacactactcgaaccatacaggcccaaggaaatactcagagaacaaattggcctcggttgaaatcctcatctcttgtatagtgacaggacacttatataaaagtaataatagggctgggtgcggtggctcacgcctgtaatcccaccactacggaaggctgaggtgggcggatcacttgaggtcaaaactttgaaaccagcttggccaacatggtgaaaccccacctctactaaaaatataaaaattagccgggtgtggtggtgtgcacctgtaatcccagctacttgggaggctgaggcacaagaatagcttgaactggagaggtggaggttgcggtgacccaagatcgcaccactgcactctagcctgggtgacagactaaggctccgtctataaataaaataaaataaaataaaaagctcacacctgtaatcccagcactgtgggaggctgagacgggaggatcacttgaggtcaggagttcgagatgcctgaccaacatgtcgaaatcccatccctaccaaaaacacaaaaaaattagccaggcatggtggcgcatgtctgtaatctcagtgattcaagagggtgaggcataagaattgcttgaacccaggaggcagaggttgcagtgagccaagatcacaccactgcactccaccctgggcaaaagagcaagactctgtctcaataataataataataataataataataataataataataataataataataccagctaggattattgctttgtgaccttccttgtgtgtttcatttgttgttgtgacagggtcttgctctgtcacttagactggagtgcagtggtataattaaagctcactgcagccttgatctcccaggctcaagggatcctcacacctcagtctctcaaatagctgggcccataggcacatgccatgaagctcagctaacctttattttatttttttgagatggagtctcactctgtcccctaggctggattgcaacggtgtgatcttgactcactgcaacctctgcctctcaggttcaagtgattcttgaagaagagaccctgactctttttttttttttttttttgagactgagtctcactccgttgcccaggctggagtgcagtggtgcaatctcagctcactcactgcaatctcttgcctcccgggtacaagcgattctcttgtctcagcctcccaagaagctgggattacatgtctgtgccaccacaccggggtaatttctacatttttggtagagatggggtttcaccaagttggccaggctggtcttgaactcctgacctcaagtgatccgcccacctcagcctcccaaagcgctgggattaaaagcgtgaaccactgtgcctaatgctcagctgacgttttaaaactttttgcaggccgggtgcggtggctcatgcctgtaatcccagcactttgggaggctgaggcgggtggatcacgaggtcaggaattcaagaccagcctggccaacatagtgaaaccctgtctctaccaaaaaaacacaaaaattagccgggtgtggtggcatgtgcctgtagtcttagctactcaggaggctgaggcaggagaattgcctgaaacctgggaggcggaggttgcagtgagctgagaccgtgccattgcctgggtgacagaatgacactccatctcaaaaacagaaaacaaaaaacaaaaaacaaaaaacactttttgcagagatgaggggtctcaatatgttgcccagagtgatctcaaactcctagactcaagcaatcctcctgcctcggcctctcaaaagtgctgggagtacaggaatgagccatagtgcccgcctgtaatcccagcactttgggaggctgaggtgggcagatcacctgaggtcacgagttggagatcagcctggccaacatggtgagaccccgtctctactaaaaatacaaaaattagctggccgtggtggcgggcgtctgtaatcccagctactcgagaggttgagacgagagaatcgcttgaacctgggaggcagagattgcagtgagctgagattgcaccactgcactccagcctgggcaacagagcaagactcagtctcaaaaaaaaataataaaaataaataaataaaagagtcagggtctcttattgctctgtccccaggctggagtgcagtggggtgatcacgataatggctcactgcagctttaacctcctgggctcaagccatcctccattctcagcctcccaagtggctagaactacaggcatgtaccatcacacccgactattttttttttaaattttattgtaggcctggtgcgatggctcacatctgtaatcccagcactttgggaggctgtgagcagaacacttgaggtcaggagttcgagaccagcctggccaacatggtgaaaccacatctctactaaaagtacaaaacttagctgggcatggtggcagacgcctgtagtaccagctactgggtaggctgaggcaggagaattgcttgaacccaggagacgaaggttggcagtgagcagagatcgtgccaatgcactcactccagcctgggtgacagagatagactccgtctcaaaaaataaataaataaataaataaacaaatatatatatatatatatagagagagagagagagagagagagagagagagagagagacagagagagggagagagagagaaaggagttcttttttttctttttttgagacagagtctcactatgtcacccaggctggagtacagtggcgcgatctcggctcactgcaagctccacctccagggttcacgccattctcctgtctcaggctccggagtagctgggactacaagtgcccgccaccatgcccagctaattttttgtatttttagtagagacgaggtttcaccacgttagcaaggatggtctcgatctcctgacttcatgatccgcctgcctcggcctcccaaagtgctgggattacaggcgtgagccactgcgcctggcaaggaggtgatctttctctgttgcccaggctggtctggaactcctggcttcaaggagcttttggcctcccaaagctctggcatgacaggtatgggccaccgtgcccggcctgtgaccttccttaaccctcacaccacactgtaacacagggatcacgttatgctacaattatgcccattgaacagatgagaaaatggaggctgaaagcgactacgcttctattttcctctcagccacagtcactaacactgtgtgcaaaaaatttctgactctccccctttggaccaaacaggtggatggcacttcctggcctccttgtgactgggcagataaatgattatttctggcaaataggttgtgagaggaagtggcacatgacatttctgggctgaggcatttaagtgctggagcctccagagatctatctttcccaggcagggtgatgagccacatttgatatggtggcgactctatgaggccgggccctgaatgactacggtgaatggtgccccctgctgagccgcaatggaagtgtagcaggaagaaaaagcaaatctttgctgaattcagccactaagacttttggggttgttttctacaccacatacattttttttctgtttctttcttgctttctttctttctttttttttttttttttgagacagagtcttgctctgtcacccaagcagcagtgcagtggtgcgatctcagctcactgcaacctccgcctcctgggttcaagcgattcacctgcctcaacctcccaagtagctgtgactacagaagactcctgacctcaagtgatccacccgcctcagcctcttgaagtgctgggattacaggcatgagccaccgcgcccggcccgcttctttatttctctctttctccattctcccctcccttcaaacaattttttttttctttttagtacttactgtattctgtgcaccattttagatactgtcttcaataaaaaaagcaagatccctgactagggccaccatgttcagttacacaagttgtgtactgtgcaaaattactagaccaaggtggcaagtaggactgaaattcggtctgtgcactgcctgccaagctatatttcttggtgtggtgtctgccaggaggaagagatgcctttctttttttcttttttttctttctttctttttttttttttgagacagagtctgttctgtgttgcccaggctggagtgcagtggtgcaatcttggctcactgcaagctccgcctcccaggttccagcaattctcctgcctcagcctcccaggtagctgggactacaggtgcacgccaccatgcccggctaattttttttgtgtttttagtagagacggagtttcactacgttggccaggctggtctcgaactcctgacctcgtgattcgctcgcctcagcctcccaaagtgctgggattacaggcatgagtcactgcacccggccgaagagatgtctttctaattcactcacagatgctatataggctagctggggctctgcacatgacctccagaagtggacagtccggaagaggaaatgcacagggagcagggaaatgtgtaaatgtctaatataaattttttcctttattttcctttttttttttgacagagtcttgctgtgttgccaaggctgaggtgcagtggtgcaatcagagctcactgcacccttgccctcctgggctcaagtgatcctcccgccccagcctcttgagtagctgggaccacaggtgcttgccaccatgccctgctaatttttttatttttattttttagagacagggtcttgctatgttgtcccggctggtctcaaactcctgggctcaagtaatcctcctgccatggactcctaacgagctgggattataggcatgagccactgtgcccagcctcatataatttttaatagtgatatggagacaaagcaagacaagttctatagacaagatcagtgagggcgtctctgagcacgtgaagctgaacttgagacctgaaccacaggaggaagcattcatgcaatgatttggggcaagaacgtcccaagtagagagaacagccagtagaaaggccctgagctggggctgggcatggtggctcaagcctgtaatcccagcactttgggaggttgaggttgacggatcacatgaggtcagcagtttgagaccagcctggcctacatggcaaaaccccatctctactaaaaatacaatacacaggtgggcgtggtggtgcacacctgtgatcccagctactcgggaagctgaggtgggagaatcacttgaatgcaggaggcggaggttgcagtgagccgagatcacaccactgcactccagcctgggtgacaaaccgagactccatctcaaaaaaacaaagaaaagccctagccaggcgcggtggctcatgcctgtaatcccagcactttggaaggccaaggcaggcggatcatgaggtcaggagtttgaggccagcctgaccaacatggtgaaaccccgtctctactaaaaatacaaaaattagccaggtatggtggtgcatgcaaacctcatctctactaaaaacacaaaaattagctgggcgtagtggtgcatgcttgtaatcccagctactcctgaggctgaggttgcagtgagctgagatcacgccattgcactccagcctgggcgacagagcgagactcggtctaaacaaaaaaaaaaaaaagaaagaaaagccaagccctgaactgggcatgcaattggcatgtttgaggaacagtgaggaggcctggggggttggaacagtgagtgaaggggggatagtgagaacatgagggcagggaggtaacaggttgctatgttttcctgattttttttttttaatggggtctcactctgtcgtccaggctgcagtggagtgatgtgatcacagctcactacagcctcaaattcctgggctcaagcaatcctcctgtctcaacctcctgaatagctgagactacaggtgttcacagccatgcccagctaatttttattttttgtagagacgggtctcactacgttgcccagattggtcctgaactcctgggctcaagcaatcctcccgccttggccttccaaagtgctgggattataggcatgagctaccacacccagcctgctatggtttggataaggtttgccccattgaaactcatgctcgaacaatcgattggctaacgaggtcgatgacgccaggcacaagatgctgggcctaccgcggtagcgtgagggaagccgtgcgttctgttccaaggcatctgtgagcccatggagtatacaccatgagcaaagctcaccctcctgagttgaaaaaatttacggacaagaagttttcattgaaattaaatggtggcagacatgtccaaggaatattgcggggatttgatccctttatgaaccttgtgatagatgaatgtgtggagatggcgactagtggacaacagaaaaatattggaatggtggaaatacgaggaaatagtatcatcatgttagaagccttggaatgagtataaataatggctgttcagcagagaaacccatgtcctctctccatagggcctgttttactatgatgtaaaaattaggtcatgtacattttcatattagactttttgttaaataaacttttgtaatagtcaaaaatgttttttcagatgttctgaatatacaatattagctctcattccaattttttctaacatgaattttcctggttgacattgatttcaaagggttttatgtattaaagtgacagaatcttattaaatgtgaaacatggcaaggagaaaaaaaaaaaaaaagaaactcatgctaaaatttgatccccaaagtggtggtgcggtgttgggaggtggggcctagtgggaggtgtctgtgttatggggccagatctctcctgaatggcttgaagtagctctggaagcaatgagtgcttgctctcaagagcccggattagttctccagaacttacagtagttggccaggtgcagtggctcacacctgtaatccctgcactttgggaggccgaggcgggcggatcacgaggtcagcagttcaagaccagcctggccaacatggtgaaaccccgtctctactaaaattacaaaaaattaggccaggcacggtggtgggcacctgtaatcccagctactggggaggctgaggcaggagaattgcttgaacctgggaggtggaggttgcggtgaatcaagaccgtgccattgcactccagcctgggcaacagagagagactcagtctcaaaaagaaaaaaaagaaaatacattagttaggccaggaacggtggttcacgcctgtaatcccagcactttgggaggcagaggcaggcggatcacctgaggtcgagagttcgagactggcctgaccaacatggagaaaccccatctctactaaaaatacaaaattagctgggtgtagtggcacatgcctgtaatcccagctactagggaggctgaggcaggagaatcgcttgaacctgggaggcagaggttgaggtgagctgagacagtgccattgcactccagcctgggcaataagagcgaaattctgtctcaaaaagaaaaaaaaggccaggtgtggtggctcacgcctgtaatcccagcactttgggagtccaaggcgggtggatcacgaggtcaggagatcgagaccatcctggctaacacagtgaaaccccgtctctactaaaaatacaaaaaaaattagctgggcgtggtggcacacacctgtagtcccagctactcgggaggctgaggcaggagaatggcgtgaactcgggaggcggagcttgcagtgagccgagatcatgccactgcactctagcctgggtgacagagcgagactccatctcaaaaaaaaaaaaaaagaaagaaagaaagaaagaaaatacattagttaggccgggtgcagggacggtggctcccgcctgtaatcccaacactttgggaggccgaggcgggtggatcacctgaggtcaggagtttgagaccagcctggccaacatggtgtgagccaaagaaggctggtgtgagccactgcgctcagcctatattttcttatgtaaaagggacttcctggtgcctcctatccaatggtctcttccagggggccatgctggattcagcttggccgcatccaatcttttttttttttgagatgaactctcactctgtcacccaggctggagtgcaatggcgcgatctcggctcactgcaacctccacctcccaggttcaagcgattctcctgcctcagcctcctgagtagctgggattacaggtgcgtgccaccacacctggctaatttttgtatttttagtagagatggggtttctccatgttgaccaggctggtctggaactcctgacctcaggtgattcgcccaccttggcctcccagagtgctgggattagaggtgtgagccactgcacccagcctgcacctagtctcatgtatccatttgttcatgcatccattcgtctgtcccctaacacaccctctcatctcacctggtccatctccatgatcacttacctaaactagtgtggttgcctcctgtgggtttcccagcttccaccctcaccccctacgacttcttgtccagacagcagccagaatggtcctgtaaaacataagtcatgtcgcatttgtctctgctctgacccctccccgggctctgacctcgctggaaagaaaaatcagtgtcggccgggtgtggtggctctcgcctgtaatcctaacactccgggaggccgaggtgggcatgagccaccacgcccagccatatattttcaaaattagccaggcgtggtggcgggcgcctgcagtcccagctactcggaaggctgaggcaggagaatggcatgaacccgggaggtggagtttgcagtgagccaagatcgtgccactgcactccagcctgggtgacagagtgaggctccatctcaaaaaaaagaaaaaagaaaagacccctcatcatccctccaattccgccagctctacgcactgggaggcaggaaactaaaaacatgaatctggaacctggcttcatctcttaatagctgtgtgactttgggcaagggtcttaacctctctgagctccaaggaaatcatgcatgtgcttggaacagtcctggcacacaataagggttgcataaatattggtgacaattactgctactgccatcttttgtttttttttttgagacggagtctcgctctgttgcccaggctggagtgcagtggcacgatctcagctcactgcaagctctgcttcccgggttcacgccattctcctgcctcagcctcccgagtagctgggactacaggtgcccgccaccatgcccagctaattgtttgtatttttagtagagacgctgtttcatcatgttagccaggatggtctcgatcccctgacctcgtgatccacctgcctcggcctcccaaagtgctgggattataggcgtgagccactgcacccggccttgctactgccatctgtaccaagattcaagcttcctccttttcccaagatccctacatcctgaccaccaattcccagcctccttactctctctctctgcccaccccactgccctggttcatgccagcttccgtgtccccacccgtgaggaggcattaacagcagtgaggaaagtgagtgagtaatgaatctgcctgccacggccataagaggcttcgtggcctgggttcaaatcccacccctgccacttaccagctgtgtggctggggggcaagtcacttcacatcacagggcctcagtttcttcatctgaaaaatgggtggaattcctgtcactctcaaggtggttgtggaaatccaaagagattacccacgtatcccatctacactctgcctcagactccatttaaggacgctgttgtcattactatgggtgtctcctcctctgccctgccctgcccaggaatatcccaaccctctctgcctgccaatacctactccaggcccactcctccatgaagcctcccaggcttgccccagcatgctggaactgcccctgtggtacagatggctcaggcccatgaacttaattgcatgctgccctggcagaactcttgtcttccagcttcaggctgtcatttaacttcatgtctctattttaaaacgtaaaccagatggcatcactgccctgcctgaaactttacaacagtttcccaccttctggaagaaaaactgcaatctccttactgtgacccacaaacccctgcagaatcgctgctctgggttcatcttctgctccaaccatgtgattccaaacttggtccagcctaaagaccttggccttgcccatctctctctcttttttttttttcgagatggagtcttgctctgtcacccaggttggagtgcagtggcgccatctcagctcactgcaacctccacctcctgggttcaaacgattcttctgccctagcctcctgagtagctgggattacaggcacgcaccaccacatccggctaatttttgtatttttattttgtatttgtttatttttatttatttatttatttttgagacggagtttcattcttgttgcccaggttggagtgcaatggcgcgatcttggctcaccgcaacctctgcctaccgggttcaagcgattctctcctgcctcagcctcccatgtagctgtgattacaggcatgtgccaccacgcccagcttattttatatttttagtagagacagggtttctccatgttggtcaggctggtcttgaactcctgacctcaggtgatctgcctgcctcggcctcccaaagtgctgggattacaggcataagccaccacgcctggcctatttttatttttttttgagatggagtctcgctctgtagcccaggctggagtgcagtggcacgatctcagctcactgcaacctccgcctcccgggttcaagcgattctcctgcctcagcctcctgagtagctgggcttacaggcgtgcgccaccacacccagctaattttcatatttttaggagagagggggtttcaccatgttgatcaggctggtctcaaactcctgacctcttgacccacctgtctcagcctcccaaagtgctgggattacaggggtgagccatgcccctagccaatttttgtatttttagtagagacagggtttccccatgttggccaggctggtctcaaactcctgacctcaagcaacccacccgcctcggcctcccaaagtgctgggattacaggcgtgagccaccgcgcccgggcccccttgcctgatctttgctgggctggcaccccttgcccacaactactctctacagtaccacccgctcatattttattcatagcagttagtgccatctgaaattatcttctttatttacttgctaacttgtttgttggctgcttccttcctttcagagtgccaactcctcaaaagtagggattttgttttgttcactgttgcattttctgtgccaagaacagtgcctagcacatgcacgtagcaggtgctcactaaatatttgtagactgagtgaatgaatgtgtctcaggtcctcgttctgattgctctctgtgctccccatccttgaaacagccccctaaacatgcctgctgtgcggttgccaactgtcctaggctccccactttccctggctcccctcacacctgaacacagagatgaagagccacttcagcccggatattgagtgtttgggctggaatttcagcatcctcaccccctcatcctgggaagggcctgaaacttagcaaccccacggccacacagaagcagtgtggccagcaggaggaggggaagggggttcctgggagcacacagaagctaggggaagggggaaaccacgcccaggctccccgttccagcacagtgttgctttggagagaaggagggaaagaggcctctgattcactcttgaaaaaccggctcctgggtgtttccggggagaacgcctacttcccagcctcggcccaggttgccaggggggaacccagtgggcccagaccccagcatcctggccccctgcagacgccactctcttctctggacccaggtagttagacctgccctctccagctctggggagaagggaaaggagggcagcttcctgtttgagtggctggtaaagcaaaagaccagcaggtgtggccctgatgatgagtacggggtagggggtgggaggggtagggggccggagctactcagcaacaactgagccgtggagttattggtatccagtctagtgggtgtgactccagttctggaccctggggcatgagttccagtcccagatgtgccagttactagctgtgtgaccttgggcaagtcactccacctctctgggtaggctgcctcaccttttttacaagaaggcacagcacctcccatgaggtgtttagagtcaattatcctcatggtaaatgcctgacacggaagctctccaataaatgctagctgaggtggagtttttcatgacgattattattcagaccgtggtcctcactgcgtcccccccaaggccctggagggttcagacgcggttagctcaggggaagtgcccaggaaagggtcagaaacactgaccccgcgcctgtccacgctgggatggggacagtccagccgggggacggggggaggggcaagcccagaaaccccagcccagcgttgggaggcgtttgtcccctgcccgccagcaggaagggagctgcccccaccaccccccacccccgcttcccctgggaaggggcctccggcatccccgcgcgcagcctagacctccagtcgcgtccacggcgccggccccaccctgcaggatcggccggatcctcgcaggcccgcgacccccgaggcccccggagcagacacatccttctcgcagaggccactcacctgctccgccgccgccgccgccgccgccgccgccgccgctgcctccgcctccccgtgcgcacccggctcggccctccgcaaactccagaccgggcctctcccgcagcggcgcctggggggcggggccgacgcccgcggccggccaatcagcggctgcctctcggtgctcgcagccaatccgcgtcttccgcttcgggtggacccgacggaaacattccagagggatccctccgcctcgcccggctcttcccgactcctcccctcgccgcgaagcagtggaccgttccgccccgcctaagccgcggctggctgtaccaccggagggctgaggaggggggggagctgcagctgggccccggccaatcgcgagggaggaaggagacaagcggccaatgggaaggaagctggggcccctgaaccacgtgctgtcggctgagtgtcagtctcgggtgccctgggtggtgaggggcgggggagtcaggtgacctaggccaggtttcggggaaaggattcgaacttccgacgtccaggaaagcggacagtttaggagacctgggtgggggtcaatggcagtccccaacccagttccctgcccggcctcctctgccccagcctggccatcctcggagcggataaaaagatgcattcaatctctgggggcgggcgggggatcgagatgaatagggagggtcccgagtttccctgcttcctgggctgtacaatggacaaaggcattcattcattcattcgttcactcactcatcaaatatttaatgtgccagactgctccgtgccagactctgtcctacctctgaagacgcgtcagtgaataagctgaatgtgctcctggtagaggtaacagagcgtgcaaaagccggacagagagatacagcacgctttaggatactgcaatatcgtgggagctagtaaatcagtgtggaaaggcaagatgcaatgaaagacaagggtgagatagtttatctgcttgttggtttgtttatgtgctaggtcacagaaggtacccagccagcctttcatagatctgtctcctccatctgactgtgagggtggaggctgagtctctcttgtcaacccctcactcccacctcaggctgccacacggcaggttctcagcaaacctgtgtggacaaatagaccatgtagtttataaggaagggggatttatcaggtggacacagatccaagaaacaagagtcacaaatgcacctggaccaggccaggacgctcagttcccgggacaagtgagatttccttgttctagttcaaacccagccacttggacagcaactggggctgaatgctgtgtgttctgggaactgtagttcctggaagcctctaagtgctgagaccctgctcaagctccatagaaagactggttctttgcagttcccagggtgagatgttgtgcatatcagtcccaccaggacctgcagaggggcaaactaaaatgggagatggaaccttgagctttgctgctgaggattgcctagccagccccacccagctggcaaacaccgagattgctgtggcaggccaggcaacaggcacagctattgtccgtcccttcctgttctgctgacctctgccatcccactgagcaatcagttgcctgggctggccagtaccctctgtgggactgtgctgcctgccctgcttgagcctggcatctaagctgccccctgcacacttggagaggacgggatgctgagcccaggggacagcatgactgaggctgcagagtcctgagccagactccaactggctcctgtttcctgatgaggaagtgcccggagaaggggtgatgggattgtgggattgctcaagacacagagcagcactgggcacctcctttctgaatttttttttttttttttttgagacagtgtctagctccgttggccaggctggaatgcagtggcaggatctcagctcactgcaacctccacctcctaggctcaagtaatcctcccatcttagcctaccgagtagctgggaccacaggcatgtaccaccacacctggctaatttttgttgttgttgttgtttgtttgtttgtttttttgagacggagcctcactctgtcacccaggctgcagtgcagtggtgcaatctcagcttactgcaacctccgcttctcaggttcgagcaattctcacgcctcagtctcctgagtagctgggattacagcgtgcgccatcatgctcggctaaattttttgtatttttaaaagagacggggtttcgccatgttggccaggctggtctcgaactcctggcctcaagtgatccacctgcctcgtcctcctgaaatgctgggattacaggcatgagccactgcacgcagtctattcctttgtttgtctgtttgtttgttttgagacagagttccactcttgttgcccaggctggagtgcaatggcgcaatctcggctcactgcaacctccacctcccaggttcaagcgattctcctgcctcaacctcctgattagctgggattacaggcacccgccaccacatctggctagttttgtatttttagtagagacagggtttcatcctgttggccaggccggtctcgaactcctggcctcaagtgatccaactgcctcatcctctcaaaatgctgggattacaggcatgagtcactgtgccaggcccatttgtttgttttttgatagagacagggtctcaccatgttgcacagagctggtcttgaactcctgggctcaagccatcctccctctttggcctcccaaaagtgctgggattacaggtgtgagccaccatgcccagccctccttcccgattttatagctcaagaggaatgcctaaaagctgaggctgggaagtccaatggtgagcagcttagatgtgagcgctacctctgttcctttaaaagaaaaaagaggccgggtgcaatggctcacgcctgtaatcccaacacattgggagggtgaggcgggcggatcacaaggtcaggagttcgagaccagcctggccaacatggtgaaacctcgtctctactaaaaatacaaaaattagctgggtgtgatggtgggcgcctgtagtcccagctactcaggaggctgaggcaggagaatggtgtgaacccgggaggcggagctggcagtgagccgagattgcgccactgccctccagcctgggcaacagaacgagactccgtctcaaaaaaaaaaaaaaaaaaagaaaaagaaaaaacagaaaaaagaaaaaaattccatccttgaatgccagctaacacatgcagaagggaaggttgtgtgcgttagaacatcattgttttgctgagtgcagtggctgcagcctctaatcccagtgacttggaggctgaggctgaaaggatcccttgagggcaggagttcgagactagccgaggcaacatagcaagacctccatctctacaaaaatgggtgtggtgctgtgtgcctgtagtcccagctactcgggaggctgaggcaggaggatcacttgagcccaggagtcgaggctacagtgagctatgagctacagcttcctatgtgccaggcatcattccaagaacttcctatttattaaaccatgtaactctcctgatgacctaggtgcagttttacacattgtatatttgtcctcccactctgtcaggggaaaatttgcttcacccatgatatccttcattggagggaaattcttaattttgatataatagaactcactgtgaagttatattaagaatgcttggctgggcacactagctcatgcctgtaatcccagcactttgggaggctgaggcaggtggattgcttgacaccaggagttcaagaccagcctgggtaacataatgagaccctgtctctacaaaaaataataaaaattagccagaaaaggaggcactggactatagtcccagctactcaggaggctgaggtgggaggatcacttgagcccaggagttcaagcctacagtaagctatgatcacaccactgcattctagcctgggtgactgagcaagaccctatctcccaaaacaaaacaaaagaaggccttttcatccctatatggcaaacttatacttccacattttctttattttttttttgaaacagagtctcactctgtcacccatgctggagtgcagtgatgtgatctcaactcactgcaacctccacctcgcaggctcaagcgattctcacgcctcagcctcccgagtagctgggattagaggcatgtgtcaccatgcctagctaattttttgtattttttagtgaagaccgggtttcaccatgttgtccagactggttttgaactcctggcctcaagtaatccgcacgctttggcctcccagagtgctgggattgcaggcatgagtgagccaccgcacctgactcttccacagtttccttttttttttttttttttgagacggagtctcgctctgtctcccaggctggagtgcagtggcacgatcttggctcactgcaagctctgcctcccaggttcatgccattctcctgcctcagcctcccgagtagctgggactagaggcgcccgccaccatgtatggctaattttttgtatttttagtagagacggggcttcaccgtgttagccaggatggtcttgatctcctgacctcgtgatctgcccactttggcctcccaaagtgctgggattacaggcgtgagtcactgcgcctggccccattttcatttcttcattctacgttttttggttttgttattttatttatttatttatttatttattttgagacagaatcttgctctgtcgcccaggctggagtgcagtggcgtgatcacggctcacggcaacctctgcctcctgagctcaagcaattctcctgccccagcctcccgagtagctgggattacaggctatgccaccacgcctggctaatatttttgtatttttagtacagacagggtttcaccatattggccaggctggtttcgaactcctgacctcatgatctgcccaccttggcctcccaaagtgctgggattataggcatgagccactgtgcccggcccattctatggtgttacttttcctgagtctttattccatccgtagtccacctgaggttgtggggtagaatggtcttctttttctccataacctgtgctgttcagcagctctgtgaccttgtgtgaagcccatcctcttctgtgcctcggtctcctcatttgtaaaatggagataataataatacacaccagccgggcgtggtggctcacacctgtaattctaccactttgggaggccgagacaggtggatcacttgaggccaggagttcaagaccagcctgaccaacatggagaaaccctgtctccactaaaaatgccaaaaatcagccgggtatggtggtgtgcacctgtaatcccagctactcaggaggcgcaagaatcgcttgaacctgggaggtggaggttgcagtgaaccgagattactccactgcactacagcctgggtgacaaagtgagacctcatctcaaaaaaaaaggccgagtgtggcggctcatgcctgcaatcccagtactttgggaggccaaggtgagtggatcacctgaggtcaggactttgggaccggcctggccaacatggcaaaactctgtctctagtaaaaatacaggccaggcgtggtggctcacacctataatcccagcactttgggaggccgaggcgggtggatcacgaggtcaggagatcgagaccatcctggccaacatggtgaaaccctgtctctaccaaacataaaaaaattagccgggtgtggtagcaggcgcctgtagtcccagcttaggagtctgagacaggagaatggcgtgaacccgggaggtggagcttgcagtgaggcgagagcctgccactgcactccagcctaggtgacagagcaagactccgtctaaaaatatatatataatatatatatatataaattcgctgggcatggtggcgtgcacctgtaatgccagctattctggaagctgaggcaggagagtcacttgattctcgggaggcagaggtcgcagttagcttgattccggaggcggaggttgcagtgagctgagaacatcccactgcactccagcctgggagacagagcgggactccgtctccaaaaaaaacaaaataaaataaataatagtacacacctccttaggtggttatcagcatgttaggattaaatgggctattccatgtcaaatgccccgatggtgccaggcagatagtaagcacttactgcataccagctgccattactaaaatgtgctgagggcacaatcatagatagacgcaatatgtcataatggacacaccatagaaatagaaacctgtattggatcctcgctgtgtgtcaggctctgtgctggtcgcttttcatgtctaatttcactggatcatgttgagctcctggggatgggactgatagcacccccactctacagaggaggagactgaggctcagagaggggagacatgagctgaaagatgcacagtaactcatcgatgtggaatcttagctccaaccccaggacatgagacgtccctcaagggagtgagttctactttcttcaactttggggacagggcggactgagatgtgggggacaggagggacagcaccaagggacatagccccagccaggtgatcctggaggcagggctgagtcctgtggcctcaggttacagccccagcactgtcacctgcctttttggtttgtttgtttgtttttaattgagacagaagtcttgctctgtctcccaggctggaatgcagtggcgcaatcttggctcactgcaacctctgcctcccggaggttcaagcaattctcccgcctcaggctcctgagtagatgggattacaggcacccaaaaccatgcctgactaatttttgtatttttagtaaagacagggttttgccatgtgggtcttgaacccctgacctcaggtgatccacctgcctcagtctcccaaagtgctgggattacaggcgtgaaccactgcgcccggcctgacacctgcctttgactgctgggttttaggaagtgacacccagcagctctgcaggtcacactgttttctagaggggtctttgcagaagcaaagagaaacaaatggcaacagtggtgatgataaacaccacaccagcccttctccctgaactcctgaggtatttctctgtcttgctttctctataaggacatctcagggcatctcaaactgaacccatctggaattgaggtcttgattgacaccccaaatgtgccatttaccctgtcttcccctgcatggtgatagcaattctttcagttgatcaggccccaaaccttggaataagacttaaatactacctaccttccttcctctctctccttcctttttttctctctttctctccttccttccttccttcgttccttccttccttctcttctcttctcctttcctttttttcttacttcctttccttcttccttcccctccctccctcccttcctccctttccctcttccttcctttcttttccctctcctctcctcttcttttctttcttgacagagtcttgctttgttactcaggctggaatacactggcaaaatcatgactccctgcaacctcaacatcctgggctcaagcaatcctcctacctcagcccctcaagtacctgggaccacaggtacgggccactacactcagctaatttttaattttttgtagagatgggattttaccatgttgccaaggctggtttcaaactactgagctcaaatgatcctcctgccttggcctcccaaagtgctgggattacaggcataagccactgccccagccgactcctacctttctctcatagtccagctctgtcagcagcacgtcctatcagcactactttcttttctgttcttttcctttttttaaatcccaatgggcaagcaatgacagtgaaactcacagacacatcagatatttttaaaaagcttttcttataggcacaatattttcttttcttctctctctttttttttttttgagacagggtcacgctctgtcatccgggctgaagtgcagtggtgccatcatagctcaccgtagccttgacctcctaggctcgagtgggtgtcctaccacacccagctaattttggtatttttcatagagatggggttttgccatgttgcccaggctgattttgaagtcctgggctcaacctcctgcttcagcctcctcccaagtagctgagattacaggagggagccacctatctcatctctggcccaagatatacatacatacatacatacatacatacatacatacatacatacatatatttaaagacaaagtctggctatgtcgctcaggctggagtggagtgcagtggcacgatctcagctcaccgcaaacttggcctcccagtttcaaatgattctcagcctcagcctcccaagtagctgggattacgggtgcataccaccaggccccgctgatttttttttctttttttttttttgcagttgcaagatttaatagagagaaaacaaagctcccattcaaagggaggggacccaaagggggtagccattgctggcttgaatgcctggatttatatcccgatcattgtccctcccgctgtgctctcaggtgatagatgattggctatttctttacctcctgtttttgcctaattagcattttagtgagctctctgattggttgggtgatttttgtatttttagtagagatgatgttttatcgtattggccaggctggtcttaaacgcctcacctcaagtgatccgccctcctcagccccccaaagtgctgcaattataggtgtgagccaccgtgcccggccccaagatgtattcttgggtgggtgtggtggtgcgtgcctgtggtcccagctacttgggaggctgaggtaagaggatgacttgagtccaggaggtcgaggctgcagtgagctatgatcgcaccatttcactccaggctgggcaatagaatgagaccctgtctctaataaacaaaacaaaacaaagccaaaaaaaaaaaaaaatcagccaggtgcggtggctcatgcctgtaatcccagcactttgggaggccaaggtgggtggatcgcctgaggtcaggagattgagaccagcatggccaacatagtgaaaccccacctctcttaaaaatacaaaaattagctgggcgtggtgggacatgcctgtactcccagatactcgggagactgaggcaggagaatcacgtgaacccccgagaccgaggttgcagcaagccgatattgcgccgctgcactccagcctgggcgacagagcgagactctgtctcaagacaaaaaaaaaaaaaaaaaaaaaaaaatcctgggctactttcgccccacctgctccgacctctcccggtccagccagccccatcacctcctgcctggtggtgcggtgaatggcttcggtcctggtccacccgctctgcccttacccctacggtcagttctccgcacagaggccagggggcgcccgtgagcacccaaatcaggtcacctcctttctctacggaggacctccccccaggaggccatgagcccccaaagaacctgcccctgtgagccaaagtgttttttattttcaggtgtcacgcctggctacattgatgtccagcataatattcctggggaacgttggggccccatgaaggcaaacaacccaggtcccagctctgtcttcctggtaaaagcaaatcaggccttgtccctcctaactctcaatttctcttccaactcaggaatgcagggcctggcctgtctcattcctagacacgccctgccctgctctctcctgttctctcgattccagtcacaccaggcctgtgtgtgtgtgtgtgtgtgtgtgtggatggccctgtgggggagtggttcccagatctccagcctaggggcctcttccccgggccttggctccaggagcccctccctgcgccctaacaagctcctgtcccttggcctgtgtgtccagggcctgccaggcgtcttcccctccacgctgcgggctatgggaagtggctcggtcagtttaatgagttgaatgatgccccaccctaaaatatatgtccacattccagaactgtgaatgtgacttgacttggagtaagtgtcttcaaagatgtaattcagtggaggatctcgagatgagatcatcctggattagggtggctggccccgaaatccaatgatgggtgtccttataagagatggaaaaggagaagacacaaagacacacagaggggagggccacgggacggcagcggcagagattggagcgatgcagctacaagcccaaggaggctaaggattgctgaaaccaccagaagccaggagaaagccgtcctcacttgttaatgccaggtacaggggctcatgcttgtaatcccagcactttgggaagccaacgcaggagaattgcttgagcccaggagtttgaggccagcttgggcaacacagtgagaccctgtctctacaaaaaatttaaaaattacgctggcatgatggtgcatgcctgtggtctcagctacttgggaggctgagataggaggatcgcttgagcccaagagatcgaggctacagtaagccctgattgtgccattgcactccagcctgggcaacagagtgagatcctgtctcaaaacaaacaagcaagctgggtgcagtggctcatgcctgtcatcccagcactttgggaggccgaggcgggcagatcacctgaggtcaggagttcgacaccagcctggctaatatggtgaaaccctatccctactaaaaatacaaaatattagctgggcgtggtgatgtgtgcctgtaatcccagctacttgggaggctgaagcaggagaatcacttgaacctggcaggcgggtgctgcagtgagctgagatcgcgccactgcactccagcctgggcgacagagtgagactctgtctcaacaccaccaccaccaacaacaaattacttgtcgtttgaagccacccagtttgttgtggcagccctaggaaacggaaacccacaggtgtgtttcctaggagactgtgagtttcacgagctccatcctccctcccctatgccagatggccaagttttctgcttggcgcatctcctgagcctagcactgaggtgtccctcaggaactgtgcccatagactagtctacagattgtgaagtagaaacaggtcccccatgccaggcgcggtggctcacgcctgtaatcccagcactttgggaggccgaggtaaggcagatcacctgaggtcgggagttcgagaccagcctggccaacatggtgaaaccacgttgctactaaaattacaaaaattagctgggcgtgatggtgggtgccggtagtcgcagctactcaagaggctgaggcatgagaattgcttgaatctgggaggtaggtgttgcagtgagctgagatcatgccactgcaccccagcctggatgacagagcaagtatcggtctcaaaaaaaaaaaaaaaaacaaaaagaaaagaaaaagaaaaaaagaaacaggtccctcaggaaagaggggctctcccggactgaatatctgcttctccctggtgggaaagctgaaggaattggggtatgggggtggggtccctggcaagggtggtggggactactagctgacccgagggctgggttatccttcctctgcacataccatgacatgaactatcgtaggaaaaatgttgcaggtcctcttgtctgaattactttgtcacttaattactcacttaacaaacactcaaagggtcagttccggggcaagcatcactctggcaactggtgatacagattattaggatgtagttggtgacctcaagggaactcacagttgccacaaagcgggggacattttttagtattctcctgccgttgtctctcctgccccactgacaaagagggaaggtgtctcaactaataatcagggagtttgagaaatcagcctctgcttccccttgggcaagtgtgatgtcaacagactatgaaagtactttcagccaggaggggtggctcacgcctgtaatcctagcactttgtgaggctgaggcgggtggattgcctgagctcaagagttcgagaccagcctgggtaacatggtgaaaccctgtctctactaaaatataaaaaattagctgggcgtggcagcatgcacctgtaatcccagctacccaggaggctgaggcaggagaatcgcttgaacctcgggggcagaggttgcagtgagccaagattgcgccactgcactccatcctaggtgacagagtgagactccttctcaaaaaaaaaaaaaaaaagaaagaaagtgctctcaggtctgtgggagagaagatgagtgcatgctctttaaggcctagtttttttgttttttttttttgagacagtgtcttactctgtcgcccaggctggagtgcagtggcgagatttcgacctcaggtgatccacccagctgagccttccaaagttctaggattacaggcgcaagccaccgtacccagccaaggcctagattttaatagagaatatagatagatgcttcttgtttgtgttgtgccatttttaggtgttttttttttctttctttctttctttctttttttttgacagagtgttgctctgtcaccgaggctggagtgcagtggcacaatcttggctcagtgcaacctccaccttctaggtccaagcgattctcctgcttcaccctccagagtaattgggattacaggcacctgccaccacgcctggctaatttttgtatttttagtagagacagggtttcaacatgttgtccaggctggtctcgaactgctgacctcaggtgatccacccacctcggcctcccaaagtgctgggattacaggcgtgagccactgcgcctggcccatttttagtatttagtggaagtttggtgcattgagatttcctttattctttcctttttttttttttttgagacagagtttcactctgtcaccaaggctggagtgcagtggggcaatctcagctcactgcaacctctgtctcctgggttcaagcaattctcctgcctcagccactggagtagctggggttacaggtgcctgccaccatgcccagcgaatttttgtaattttagtagagacggggtttcactgtgctggccaggctggtctgaaactcctgacctcaggtgagccatccgccttggcctcccaaagtgctgggattacaggcatgagccactgtgcccggcccagcttgacttttagatataatgtttcagtttttagtagagatggggtttcaccacattggccaggctggtctcgaactcctgacctcaaatgatccacccatggtggtctcccatagtgctgggattacaggcatgacctgctccgcctggcctggggcaggttttctgccaagtgctttagatatatttgctaatgttattcacacttgctctattcctggcctggataaagcgcttctcagggattagctgtctgagttctagctccagaagagtgagaaaggaggggctgcgatgtttgattagtcctgttatacatgggaagaaactgaggctctgaaaggttttgtcatttgtttgaggaaatgtggtgagcagaacttggacttggcacccccctaccccagaagctgggttcttcatcgctatgttcttttgtttcctaaatgcactaactcacccagatgtcacagcatctctatgagagctgcacttctgtttcccgtttcttctgtttttttttttcgagacagagtcttgctctgtcacccaggctggtgtgcagtggtgggatctgggcttactgcagcctctacctcccagtttcaagcgattctcctgcctcagcctcctgagtagctgggattacaggcacctgccaccacgcccagctttgtatttttagtagagacagagtttcaccacgttggccaggctggtcttgaactcttgacctcaagtgatccatccgcctcggcctcccaaagagctgggattacaagcatgagccaccacacctggctaatgctcagctaacgttttaggagggtggatcacctgaggtcaggagttcgagaccagcctgaccaacacggtgaaaccccatctctactaaaaatacaaaaattagctgggtgtggtggcgggtgcctgtaatcccaactactcggaaggctgaggcaggataattgtttgaacttgggaggcggaggttgcagtgagctgagattgcatcattgtactccagcctgggtgacagggcaagactccgtgtcaaaaaaaaaaaaaaaaaaaagaaagaaaagaaaagaaaagaaaagaaaaaaaacaaaagcaagcaatcaaactgggactcaaatccggaagcaagaacgatgtgagaggagtcaggggtcgccaaacactaatttagatcttcacacccagctgggtggacctgccagaataaaggtggggaatagcacaggaatgaggaagctctttatgttcacagcatcttgtgtgagaaaaaaaaaaaaaaaaagcggagtgtacagtatgtactccttgtgtaaaaaaagaaaaatgtattccccgcagcatctcaggaaaggcgcaggagagacggggaacattcgtatccagttcgggggtgtggaatcggatggtagggtgggagggaggactttcactctctgtatcctttccagtgttgtattgtgattacacagtcaaaaaataaaactgaaaatttagaaattgtgtttatgcttatgtaagcacagactcatctcttggaggaagcacaaaaatggtttttttaaaaaaggaaaaaaaggccgggtgcagtgactcacgcctgtcatcccagcactttgggaggctgaggtgggcggatcacttgaggtcaggagtttgagactagcctgggccaacatgatgaaatcctgtctccactaaaaatacaaaaattagccgggcgtggtggtacgcgcctgtaatcccagctactagggaagctgagccaggagggtcgtttgagcctgggaggcagaggttgcagtgagccgagattgcaccactgcactccagccttggcgacagaccgagactctgtctcaaaaatgagaaaaggaaaaaaaaaaaaaaaaatctgtgatgccaatgccagtgtctatagtggtgcagtaggatggggaacttcagggccaggggaaggatgggaggactcggcttttcaccataggccaaatggacctattgagtgctgttctatgattataaaaaaaaaacactgctggtattgtaatgcaggtgggtcaaagaatgagtcagttgcacacgtcctgtcatggaaggagctctgagacctgatcagagatgcagcatggaaaagtgaaataaatccattaaagaaagcccaaggctgagcctataatcccagagctttgggaggccaaggtgggagaatcgcttggggccagagcaacatatcaagatatcaagatatcggccagcgcaggttcacgcctgtcatcccagcactttgggaggccgaggcaggtggatcacttgaggtcaggagttcaagaccagcctggccaacatggtgaaacccagtctctactaaaaataaaaaattaaccaggcatggtagcacacgcctgtaatcccagttactcgggaggctgaggcaggagaatcgcttgaacccaggaggcagaggttgcagtgagccgagattgcgccactgcactccagcatgggcaaaagagcaagattccgtctcaggaaaaaaaattaaaaaaaaaaaaaaaaaaaaaggaaggtagaagtggctcacgcctgtaatcccagcactttgggaggccaaagcaggcacatcacgaggtcaagagatcaagaccatcccgaccaacatgatgaaaccccatctctagtaaaaatacaaaaattagctgggcgtgatgtcatgtgcctgtagtcccagctactcaggaggctgagacaggagaatcacttgaacccgggaagtggaggttgtagtgagccaagattgcaccactgcactccagcctaggcaacagagcaagactccatccccctccccgcaaaaaagttaacatatcaacaaatcatctctacaaaaattagacaaattggctggttgtggtgtggagtgcctgtggtcctagctactcaagaggttgagaggcgggaggattgcttgagcccaggagtttgaggctgcagtgagctatgatcctaccactgcactccagcctggacaacagagtgaaatcctgtcttcaaaaaaagaaattaaaaaaaaaatcctgagtgcggtggctcacacctgtaatcccagcactttgtgaggccgagggggcgccgatcacttgaggtcaggagtttgaggccagcctggccaacatggtgaaaccccatctctatactaagaatacaaaaattagcctggcgtggtggcgcacgcctgtaatctcagctacttggaaggctgagaattgcttgaacctggaaggtggagatcgcagtgagccgagattgcaccaccgcgctccagcttggatagagcgagactctgtctgaaaaaaaaaaaaaaaaaaaacaagcccaagactttgggaaaagtttgcatgtgggtgcaccagatatccggccaagatagacaagccaagtagtggcctttgagcaaaaaaatgcatgtgtgaaaggtctttgggcccttttaccaccaagattttcccctcaaaatcccaccgtcccactcctcacactgctacctggtaggttgcttggccgtgttttttgtgaagttcccagaattgtatatacctcaaggcttcgtgcacctttatgtttgtgacacttcagtatgaagttcacagggacttggtgtataatggagacttgggggtggggatggcagccctgggatttgtgtcaccaatgaggtcaggtcagttccgcaataaatgtgaccttggcgtgtgggatactttggtaaacatctcttagctcttgatattccagggtcacctcctgattgggctggcgtctcctggcttaatgtggctgctcttcaaagtcacccctgcaatgtctttagggaaaagccctctagacttgacttgtccaacagttgccactggccacatacatgtgtggctgctaagcaactgaagtgtggcaggactgaggaactgattctaattttattgaatttgtaagatgtttaagtaaacggtatatagaacgttctagtcattgcagaaagttctcctggactggcagggctgcccctagcctgttttcagcgcttcaactgtttcagtgggaagggaaagcaactcttagcttgacacttttttgtgagacacagcctcgctctgtcacccaggctggagtgcagtggtgggatctttgctcactgcaacctctgcctcccatgttcaagtgattctcctgcctcagcctcctgagtaaatgggactacaggtacgtgcaccacgcctggctttttgttttaatagagacggggtttcaccatgttggccaggctggtctgaaactcctgacctcaggtgatctgcccgccttggcctcccaaagtgctgggattacaggtgtgagccactgcgtctggcccagtttgacttttggatactgtgttttagtttttttttcttgatacagggtctcactttgtcacccaggttggagtgcagtggcacaaacacagcttgctactgcctccacctcttgggctcaattgatcctcctgcctcagtcccataaatagctggccctacaggtgtacgctgcattctccggctgaatttttaaattttgtagagatggggtttcacaatgttgtctaggctggtctcaaactcctgagctcaagggatctacccaccttggcctcccaaagtactgggattacatgcctgagccactgctcctggtctatatacagtgtttccactttagaacattttgtaacaaagcagcaatacattgttttaagcctgagcaattactttataataaaaccagttattttaaagaaagttacaaagtaaaagcagctttagtagcctgcaaataaagccaaggcaggaaatgggtcctctctacagtggggctagtcctgggcaggaccttgagctccggtttggccagccttcaggacgcccagcccgttctagcagggaaggagtgataaggaattaagaggccagaccctgggttggccccttggccccagagccaaggtctgctgaaaaagccagggaccctgaagaaaggcagaattaggagccagaccctgcctctccccaccgctactttgactccaaccttcatcaaaaaatgatccccaaggccactgtgcttgggtctctggttttttggaccccgagtctgggtagaagttctccaacccacttatggctgaggaagggagacttacgtttcccttgcagggcacttgcctcctgcccatcccaccctctcaccttgattgaatttggaaggatgcccagctccccactccacccccaaaaccagcagaaccctcaaacagagtcacaggaccgctcccctgaggtttagcatcagtctttaatgctgtcgcacttcattgactagtcacacactttggtctcatgttggcagtggcaacttacaatgagtctaaaggtctgagcactggactggcctccagggaacagacatttgttccaactccccttccctccccaagatttcttcagaattccattatggccctatacagagagcactggctgccggggacaggttttgagtgtacaccaactatacatggaattataaaaacatatttacagacgttccacagtgctcctgtaatcagaagcaaagacccttttatcaaaagggattgtatctagggctgtgcaaaattcaaaaggatcagatccctttgaaagagtccatagtccatgaaacaaaaaattacctgggccactggtaagccccacgtgtgccaagattgccttacagaaatgtaaagagtgtgacccacaaagtgaggacattcagcttcactggagccagaggtcaggaaggccccttgctgaggccaggctcccagaccatcaagggagaggtggctgcacttgctggagtcactcactggaggctggctcccttggtcctgctggaacgagaggtattgcttgtggacgccaaccaggcagttctgcaggaatagtttaggttctcaatttgagatggccaaagagaagacagaattctccaggagaagagcaagacatgggagacaaatacagaataaagcacaaactgatcacacaacagaaaaggaggagtgtacagggtctgggaatcaagactgcaggttgacattatctaccagccagaagcaaaaagacacagagggatcaagtccatctgctggtctgcctctcacccctggccagggactggaggtggatgtgggcccatcccgggagggctgccagacccagtggggcagactggaatgccttttcctgctgttcccaccacctgatgccctatagctcgaaaaaccactgaagtctagtgtgcgactttgaaagattgtaatatatgctctggaaaacattcagcagtacgaaagccctccctgggccctcccaccctctcatggtccacaactggtagaaaggtccagaaatccttgagctctggaaaggtccctggtcagtccttggggagctcagatagctatattggaagaacctgctcaagtacggttcttgatgtctggggaatcctttcggggaagatcacttcaaactcaataatgaggtccccacgtttctcgggtgttttggggagggggaggccttctccaggaacttttcgccgcatgccaggcctgataacatctttgaatacgacgggtatcgtcctgccgtccagagtggggacgttcactgtgcagccacacagagccttgaaaagcaaaaggacagcattagatggaagctggctcaagaggctcagctcttgcccagaggccgtctgccatagataagacccatcaggcctctgcagctaagacctggcccccaaatctacacgtccccaccacgaaagctccacaacagcgccctggtcagtcctgttcactgttgtgccccaagcctggcacgcaccacacaccccaacacattggttcagcaaatactaaactgcttcaaaaagcagccatcgccctctacagacaccgccccacctggcaccttacctcccggaggctgatcctggcaggataaatgacatcagagccatctctcttaaagatattgtggggcttgtcctttaaaacaaagacgatatcagctggaatgttgttggaggtctggtctccttccttggggaaagtgattttggttccttctttccaccccttcttcacttcgatggtcaatattttgtcttcgtttcgaatgctctttccgtcggggtttagccgcttgtgggagattttcatcttcttggtacagccgctgtagatctcttcaagggagactcgaaggtcgtgggtgactgggggatcttgcttctttcgggcgggctcttgggcagagcgggagcggccaaagttcacgttggtgaagccacccatgcccatagggaagccagagaatgggtcatcaatgtccatgccttcctccccgttccgctgcccaaaaaaggtgtcaaagggatttctgccaccgaagaactcagcaaacatggcatgagggtctccatggaatgtgtagctgaaagaggtaccattggcaccaccgccgctaccgccactggggccactcccctttaggcctgaaaagcagatttagaagcagtcagatggctgaacagcagactctctctcgagcttcccttacagggggaaacagcttggaagccatgggggaggaacttttttgtctgtcaggggagagcaaggaagaaccccaagtttctacctctcactgccaacagcagagacgcccccctaccaacagtatttccgcgtagcctgacagtggaaaaggactcatgcggttaggtgttcacctccaggtgccacctaggccctgccactcctggactgacccatcctcctggcaacatcaccaagagatggctaaagacacatggtccagggtcggctttcggtaagtgtttactctcaacgttttagggctaatggtgcgtaggaagagaagaaaaaaaaaaacaaaaataaatagggagtttttaaatcctcacacattagcattcactgccaccatccttgcacaaaaagtcagctccagatcaagcccagaagccagcctgaatcatcaacgggcacaggaacaaaaagccctgctctccttaccctccgaggcggccccgctctccggacctgggcggccgctgcctcctgcgtgccctgccggggccaggtcatcacttcccgggaattatcccaacccagcccccaagcccacgaacggggtcggctcctgcattcacaacccctcgccccgcagctgagccggaggcgccgccccgcggaccccggcggccgagcccaggtgagcccgggtccgcagcgggctccgccgcgccgtccccgtcgtcacccccggctcccccacccccatgcaccgcaccccggggctgctcggggccgcgggaggaggcgcccggggaggggcagccccagacatgctagaagcttctggccgagcggctgggccaaggctcctcctcccaccgcgcggccgccaatccgagggcggaggcccgcgaggccggagggcggggcagctcggccccacggcccggggcgtccttcccggggggccgccgagaggggccagcgtgcctcagtttccctgtctgtcaaaaggcggggccgcgcccctggccgcgagcacacaccttcctccccgtagcggtcgaagatctcgcgcttgcgcgggtcgctgagcacgtcgtaggcctcagcgatctccttgaacttctcctcggcgccgggctccttgttcttgtccgggtggtagcgcagcgcctggcggcggtaggcccgcttgatctcctcgtccgacgcgccgcgggccaggcccaacgtctggtagtagtctttacccatgaccccctcctgcggcccgccgacccgctgtcgccgtcccccggctccgccgccgaccagtcccggactctatatacccgtccggcggaagcttccagagcccgccagccccctccagaaccttccgccccgcccgcccccgcggcgccggccaatcgccgccgccctttcagcgacacgcgacatccggggcggggcctcgccgtcaacggccgcccgcgcggggccacgccccctcccgctccgccctcggcaacacctccccgcggcgcgcgcgcacaggtcggaggaggccccgcccacctttcgggacgagccaatcgcgaccttctttccctctctacgcggccccagctaccctgcgtcccgccctccgcctgggtcagtaggtcgggacccacagcgaacttgctgttccaggaaggggtggggcctgggactacccagtcctttccccgggaggcgatgaacctgctcgcccttgtctcgtggggcctgcggtgggctcccgcccggtgacgccggacgaactacctaacctgtgtctgcctaacccaggggcccccttctatctacaacatggcaataagagaacctatcaggccgggcgcggagcctcatgcctgtaatcccatcacttcctgaggccaagacaggaggatctcttgagcctaggagttggagaccagcctaggcaacataaggagactccgtttctatttaagattaacaaacaggccgggcgcggtggctcacgcctgtaatcccagcattttgggaggccgaggcgggcggatcacttgaggtcaggagttcgagaccagcctggccaacatggtgaaaccccatctctgctaaaaatataaaaattacccgggcgttggtggcacgaacctgtaatcccagctactcaggagattgaggcctgagaatagcttgaatcggggaggcggaggttgcagtgagccgagatccggccgttgcactccagcctcggcaacagagcgagactccgtctcataaataaataaaataagtaaaataaagtaaaatgaacaaaaaacccaccagcgctattctcccaaccgtggggagaaggattttgggacggaagactgcctctgttctcacctcctaaagcaaggtgaggatctggacggaagcgcatctcccaaggtcctcccagtcccgccttcttccctttactgccctctcaagatcacttgccgctaaatttgaaatttatcttgtctcttggctttcaatgtgtcttccctcccagtctgacatcgccacctgggcaggggccaggtcctgtctgcactgggtccccagtgcctggaacgcagtgagaacctcataaatattccccgttcttacacacgtgcttctttttcttccccaactacctttataatttggggggacataggtgtgtcacacacctttcaaggcctctgtttcctcaattgtaggcaacacgatcgcgtttggctctgaaagtctggggtgcctctgtcaaggacagagctgatgggaaaaggaggctcagaaaggggttccacctgggaagggcccagggaagtgggggaggttcctggaagaactgcctgggaggtcagagccatgtaacactggctctggaaccagacagctgggcttcattcccagctccagcatttcccggctgggtaaccttgggttagttactaggcctttgctggccttagcttcctcatctgcacaatgaggaatgaggatagcagttgtgcccacatcatgagggctttgaagtttatatgagtcaacatttgcaaagtgctcagagcaggcatggcacaaaggaagcattgtcaaaggggtgactaaccattttcttagtggtgggctcttcagccatcacctcattcctggcagctaaaagattccagtgacagctgcccctgggcagacagggactcctgaagaagaagaccatcctcctgcctcctgaggcgggaggatctcttgagcccaggaatttgaggctgcaggcagctatgattgtgccactgcactccagcctgggtgacagtgagaccctcagcctccccataaaaaagttacataaataactatcaggagcatcatggcggatagttacataaataactatcaggagcatccagcaggcagatctggttctcttggcccactcaatgatctctgaggtaactgcatcagcaagaactctggactagaactggacaacccgggaggatggggctgaaattccctagacatcgagaaccatacttgagcaggggtcctgaagcaattatggggagagagaacttgatattttttaaaaagttactaggctgggcacagtggctcacgcctgtcatcccagcattctgggaaggtgaggtgggaggatcttttgaggccaggagttccagcctgggcaacatagtgagaccccatctatacaaaaaattaaaaataaaaaaaattagccgggtgcaatgatgtgagcctgtagtcccagctactcagtggaccaaggtaggaggatagcttgagcccaggaatttgaggctgcagtcagctatgattgtgccactgctctccagcctggatgacagtgagatcctgaacctccccataaaaaaattatataaataactatcaggagcattatggggaaaaactcagagcttgtgactttataaactagtattttataatataaatttaatttagaattacaagtgcagcagcctccaaaggctttaacatggctctgggtgggcctttctggttgttctaaagtttcttgccataggccaggcacggtgactcaacgcctataatcccagcactttgggaggctgaggcaggtggatcacctgaggtcaggagttcgagaccagtctggccaacgtggtgaaaccccgtctctactaaaaatacaaaaattagtcgggtgcggtggcaggtgcctgtaatcccagctacgctggaggctgaggcatgagactcgcttcaacccgagaggcagaggttgcagtgagccaagatcgtgccactgtgctccagactgggtgacagagtgagagtttcaaaataataataataataataataataataataataaaagtttcttgacacactggaggggaacattttgctaaaaacactgcggaagggatgtctttgtgcttggggtcagtgttagagctgggaactctcccctccttgagtaagcctgggtcatgttcaggaagttttgtttgtttgttttgagatggagtttcactcttgtagcccaggctggagtgcagtggcacgatctcagctcactgcaacctccgcctcctgggttcaagtgattctcctgccttagcctcccaagtagctaggactacaggtgcttgcgaccatgcctggctaatttttgtagttttagtagagatggggtttcaccatgttggccaggctggtcttgaactcctgacctcaggtgatcaacacgccttgatctcccaaggtgctgggattacaggcgtgagccaccacgcccagccagttcgggaagttttaatttttttttttttaatcagttctaggagccaggaaattaaacaaacaaacaaacccagtaactctctcctaatggacatggtactgtgacctgaacactcactgagaacttcagaatattactgaaaaaatggcctctgcgtcaacttcagcagatattgggctcttaacttggaaaagctgttatagttgtttgttgtgtcagcgtggctaagctctagaacctagttattcaactaaacactaatctaggtgttgctgtgaagttattatgttgatgcggttaggttagcacgtctacagttgcttgactttaaaaacaggacatgaccctcaaggatgtgaggatgtaagcgggcctcatccaatcagtctagagactttaaaaagccaacactgaggccgggtgtggtgggtcacgcctgtaatcccagcactttgggaggctgaggcaggagaattacttgaacccaggaggcagaggttgcagtgagccaagatcaggccgctgcactccagcctggtgacagagcaagactctgtctcgaagaaaaaaaaaaaaaaaaaaaagccaacactgaaagcaaacactgaggtttcccggcagaaaaagcatcagctcctgcctaagtttccagcctgctagcccacccagcagattttggtgttgtctagccagcccccacaagcatgtaagccaattccttgaaataaatctctgcacacaaacacagacacacacacagacacacacacacacacacacacacacacacacacacacacacacacactcctactggctctggctctgtgtctttggtaaaatcctgactgatacaggaactatgcaagtgagtctgaggacagttgctttagttcaaatcctggaccaactgtttccttatttcctacgtgtgtgatcttccacagcctgcttgatctctgggagcattaggtctgtcctccataaattggagataagagtagattaggccgggtgcggtggctcatgcctgtaatcccagcactttgggaagctgaggcgggtggatcacttgaggtcaggagtttgagaccagcctgtccaacgtggtgtctctactaaaaacacaaaaattagctgggcatggtggcatgtgcccatactcccagctactcgggaggctgaggcaggagaatcgcttgaacctgggaggtggaggttgcagtgagccaagatcacgccactgtactccagcctgggcaacagagccagactctgtctcgaaaagaaaagaaaagaaaagagtagattttacgctgctggtgttgctatgtggatgaaattgagaggaaatgaacaggaagtgaacaggaaatgaacattataataacatttttatttttatttttgagatggagtctcactctgtcacccaggctggagtgcagtggtgtgatctcagctcactgcaacttccgcctcctgggttcaagcgattctctgcctcagcctcctgagtagctgggattataggtgcctaccaccacacctggctaatttttgtatttttagtagagactgggtttcaccatgttggccaggctaatctcgaactcctgatctcatgatccacccaccttggcctcccaaagtgctgggattacaagggttgaaccctacacccggccttgtttttgtttttttttttttttgagatggggtctcacactgtcacccatgctggagcacagtggcacaatcttggctcactgcaacctccacctcccaggttcaaatgatcctcctgccccagcctcctgagtagttgggatcacaggtgcctgccaccatgcccggctaattttttgtattatggttttggtagagatggggttttgccatgttgctcaggttggtctcgaacacctgagctcaggtgatccgccggccttggcctccccaagtgttgggattacaggcataagccaccatgtctggcctataataacatctaacactgacatggccaagcctgttccaagtactcgatgaatattaactcatatacttgtcacaacagccctatgaggttgggctatcattacacccattttacaggtggggagatggagattctgagaggtcatgtgacttccccagggtcacccagagagtaaaatgctgaagtgtttagcatactgagtgcttacagtagacactcagcttgtgtataatgtgactcagatgatcataaagccttaattttaagaaaattgcattactcctgtcttcagctcttcacctgttgaaaaaaagaccttcaggccaggtgcggtggctcacatctgtaatcccagcacttttggaggccaaggcaggaggatcacttgagcccaggagttccagatcagcctggcccacatagtgagaccccatatctgcaaagaatgacaaagaaataagctgggcatggtggcacgtgccagctacttgggaggctgaggtgggaggatcacttgagctcaggaattccaagctgcagtgagctatgagtgtgccactgcacactagcctgagagacagtgagaccctgtctcaaaaataaataaaaatccaaataaatttggaaaagatcttcaaggctgggtgcggtggctcatgcctgtaatctcagcactttgggaggctgaggcaggtggatcccttgaagtcaggagttcgagaccagcctggccaacatggtgaaaccccatctctattaaaaatgcaaaaattagtcaggcatggtggcgtgcacctgtaatcccagctatttgggaggctgaggcaggagaatcacttgaacctaggaggtggaggttgcaatgagccgagatggtgccactgcactccagcctggacaacagagcgagactcgttctcaaaaaaaaaagaccttcaaaaagcgctatagccatatgagccaacaatcccactcccagtgggatacccatgtgaaatgaaaacctttgttcatatataaaaattcatggctgggtgcggtggctcatgcctgtaatcccagcactttgggaggccgaggcgggaggatcacaaggtcaagagatggagaccatcctgaccaacatggtgaaattccgtctgtactaaaaacacaaaaattagctgggcatggtggtgcacacctgtaacccagctattcgggaggctgatgcaggagaatcgcttgaacccagaaggtggaggttgcagtgagccgagattgcgccactgcactccagcctgggtgacagagcgagactccatctcaaaaataaaaataaaaaagatactattataatgttcatttcctggctcctctcaatttcatcaacatagcaacaccagcagggtaaaatctactttttttgtttttttttttgagatggagtctcatgagcgaatgtttgctgaggctttattagttattaccaacagcagttaaaccctaactgtccttcaatggatgaatggataaacaaatgggatccatccacacaatggaatactattcagctataaaaaggaatgagctacggatacaaaaaaacaacattacagatgaacctcatatgcattatgtgggtgaaagaagccaggctcaaaaggctgcatgattccatttcactcaaccttctggaaaaggcaaaagtatcaggacagaaagcagatgaatgcttgccaggggctgggacctgcaacaaatggagtagtttggagaattttttgggttggtgtaaatgctctgtatcttgattgtagtggtggttgcatgaccgtatgtgttcagagctgtacactaaaatgggtgaattttactacatgtcaattacacttcaatgaaaaaaaaaaaaagaaggagaaaaaccaaacaacccaggcaagacaggatagggcttgggaaacctctctctgggattcctgacacagcagaaacttgctaacgagccctggcttgtctagtcccagcttcacctcccctcacacacccagcgagccagctcattcatacacaacccaaaccagccaagccaggttctggaaaaagtcaagatccgacctgatctgcccatgggaaatacaaaaggagcttgtgagacacgacattaccaaacacatcacatctctggcattcaaatggtctcgggttccccccaaacctgaggtccagaaaagctcatccttggaagctgccgcagcttaggccgtctcttgcagtttctcccttggaaattactttaataaaggagctagttaccatcagctcaacaacgacccaacagatctaccagtcaccattgtgaatcagccactgctgggactgtgaagggaccagcaggatctagctgtccctacagacaggcactgtcagggggccacagtacagtgtcctcagtggcttgaacaaagtggccagtcttcattccaagggtgggtttcatttctgctgacagcctggttaccggaagccagatgggcaaacaaggggttcctcaagcctgcaacacccctcaaaaacaaagaggaattctactttggaggctggatcttgcctttctgccagcttcttatgggtgaggagggggtggaaattatttgtatgttccggttgacacgcagcatagtaggtgcatgaggatgatttggtgcctgttgagtaagtgtggggctcagaaaagcagtctcaaaagggaatttccaaaacgttctgagtttatgggaatatgtatggaatctcttcaaaatgacacctacttgtacaccatcatgccctatctaactgcaacccagagatggaagactcacctcttcagatcacattaaataagttgaaaatttgcataactggtgaaggagcaacacatggatgggtcttagggtttcaaccctatccccatggcccctcacaatcaagtacctcaggtaactcaatctgataggattttaactgtggtctcaggccgagtgggatggctcatgcctgtaatcccagcgctttgggaggccgaggagggaggatcacttgaggccaggagttccagagcagcctgggcaacataatgagatcccatctctactaaaaaattaacttgtggcctggaagcaaatactctcccccagcacccaagaagggcagggagtgaggcctgtcatgacacagaaggcctcaaaactcaaactgccaccagaaaaatatctctgctttttttttttttttttttttttttttttttttgagacggagtttcattcttgtcacccaggctggagtgcagtggtgtgatctctgctcactgcaacctctgcctcctgggttcaactgattcttctgcctcagctacttgagtagctgtgattacaggtgcccaccaccacacccagataatttttgtacttttagtagagatggtttcgccatgttggccaagctggtctcaaactcctgacctcaggtgatcctcctgcctcggcctcccaaagtgctgggattacaggcctgagccactgcgtccggccagatccttgcttttgaaagcacacatacagaacaccttcaggttttcatctgtttttcccagatagcaccagtgaaaaagataatgagtttccagaagaccacatagcgttggcttcctgtactcgcagtcagggatccccaaaggctacagcttcagaagtttccagagccaaatctggatgactgagttccaagcactgactcacccttgcctccgcctgctcccctgtgaatcagtgatctacctttaaggacttctcatcgtgtctctcatgacaggcctgtgaattccagatggttcaacagctcatgaaagctcaggggcaggatctggaaacaagagtaaggagaggaggtgaagaagtgtgccaggtactgcctgttcctttgtctgtcaaaagtcttttctttttttttcttttttttttgagacagaatctcactctgtcgcccaggctggagtgcagtggtgcgatcttggctcactgcaacctccacctcccgggttcaagcgattctcagcctccctagtagctgggattacaggtgcccaccattacacctggctaatttttgtatttttagtagagacagggtttcaccacgttgtccaggctggtcttgaattcctgacctcatgtgatctgcctgtcttggcctcccgaagtgctgggattacaggtgtgagccaccgtgcctggccagaaatttatgtgtttttcatttacagcacatctcaatttggaccagtcccatttctttttcttttttctttttttttttttgagacggtctgttgctcaggctggagtgtagtggcgagatcttggctcactgcaacctccgcctcccgggttcaagcaattcttctgcctcagcctcctgattagctgggactacaggtgtgtaccaccacgcccggctaatttttgtatttttagtagcgatgaggtttcaccatatctgccaggctggtctcgaactcctcacctcgtgatctgcccccctcggcctcccaaggtgctaggattacaggtgtgagccatcgttcccggcctggaccagccccatttcaagggctcagtggccccattggagccactagacacgattctggacgtcaggcagagaccaatgtagttcccctgtccatagggcggagcaaagtgtggaggggggccgggcggggtggctcaggcctgtaatcctagcactttgggaggctgaggcgggaggatcacctgaggtcaggagttcaagaccagcctggccaaccatggggaaaccccgtctctactaaaaaaaatacaaaaattagtcgggcgtggtggcgggtgcctgtaatctcatctacttgggaggctgaggcatgagaatcgcttgaacccgggaggcggaggttgcgtgagccgtcattgcgccactgcactccagctgggggacagaacgagattgtttcaaaaacaaaacaaaacagaaaaacaaagtggggcggggctttcattaaaaacggcagtgaagccaccccagaatggggctggggctcaaggttcttgcaggttgggggttcccaaatggggagcttttcgcgactccgtttcgcctttccttccctcccactcaagagtctcctcccatagtgacctcctcgccaaccagactccgcagcccgcgaccccagcccctagccctctcctgctgttcccggtgtaccccgggggccgcccacctcagaatttaccccttcggcgccgcctgtcatgtggatgctgccttgcctgtcactcaacttcttaccccgcccccgcgtctggcctaaccgtcgcttaccttggtttccacagcgacgccatcagggggcgtggcaaagggacgcgcggggcagagacctcctttggattggtggatggtcaagccccttctctttagcccctcctacaggcgttccgcccccttcgattggtctcgcaagttgattggtcaatcccctggtgctagtcctagtcttggttcggaccggccccaaggagcaggggcgaacgtgggcgcctcgtgccctgattggccgacggggcgcgcgcggcctggaggggcggggcggacgcagagccgcgtttagtctatcgctgcggttgcgagcgctgtagggagcctgtgctgtgccgcgcagttaggcagcagcagccgcggagcagtagccgccgtgggagggagccatgaagcattacgaggtaagaagcgagaaacaggggccgtgtggccactgctgacccattctttttccttctttgcgggaccacgggaccccactttctggtcctgtgccccgaaggaagagccagacggcgcaggcgcagtgggcaagcgttgcgccccgggccactcgtaaattccaatgcgcatgtgcgcaggaagtatttataaatctgcaacccaggctgttttgggggtactttttcttgggggtctctgcaggggctgggacgcttgcaggttccttgcagctcccccagcgggctgagttgcagactttgtcatgggagccacgaaggtgcgggacccttgctcccaatccgagggagtcttgcacaaatcttgcgccacgccgccgtcaccagcgtaggaaggggctttgctatcagtattcttgtgtacgacctttggaccccttccctcgcccgggacgttcccgggagacttaggcggtgagggaggtgcagctccacggctggctttcgcagagcagcgaagctgatcttgctttctggttatcaaagaggtcatctacgtcaacccttgggtgtcaccaaggagaaatcttatacccacccacagccactcttgaagcccaagtcttctgactcctaacttgggtctctttttcccttaaaacgaagtcttctgatgtgcttatcgccctaggtgataatataatattaataattcaaccaattatccctgaattattgctgacttttaagtaactatcatcaaataataaaatttgttattaaaattcaaaataacaatttagcaagtgcttactcttgtgctggtgagattctgttaccttgtataagaactattattattcctgtttgtaaggatgaataaagtctcagagatataaagtgacttgttcaaaggcccctagttagtaaatgcaaaacagataggggaactcaggacgccaaggtcttagttcctagccactatgccatgctggtcctcaaatgaaaaatagcaggtcgagcgatttcttgtttctcacttcccctccaatttaaaaaattctggcaaaatacacataaaatttaccatcttgactatttttaagtgtgcagttcagtggcattaagaacattcacattgttgtgcaaccatcaccaccacccatctccagaactctttgcatcttggaaaacagaagctgtagacgttaaatactaactccccattcctctccacctccacctctggcagccaccattctactcagccaccattccgtcttaatgaattgactactctaggtaccttggatacgtagaaggattttttttttcttttggagacagagtttcggtcttattgcccgggctggagtgcaatggcgcgatctcggcctactgcaaactccgcctcctgggtttaagcgattctcctgcctcagcctcctgaatagctgggattacaggtgaccgccaccatgcccggctaattttttgtatttttagtagagatgggggtttcaccatgttgaccaggctggcctcaaactcttgacctcaagtgatttgccctcctcggcctcccaaagtactgggattacaggtgtgagctagtgcgcccggctgtttgtttttattgacaagttgaatattactacctctgcctcctgccccctttattgctactatttttggaaatttacccacaatcctttgaagcctttttttgagacggagtttcgctcttgttgagtacgctggagtgcaatggcgtgatcttggctcaccgcaacctccacctcccgggttcaagtgattctcctgccccagcctcctgagtagccggaattacagtcatgagccaccatgcccggctaattttgtatttttagtagagacagggtttctccatgttggtcaggctggtctcgaactcccgacctcaggtgatccacccaccttggcctcccagagtgctgggattacaggcatgagccacggtgcctagccccttagaagcctttaacccacaaatcctgtaatttttgacatggtatcaagaatgaggaggtttgtattcaataatctctgtcatttaagttttcattctagaatgaagttctgatgtggattcccctctcaaactctatatctaaacctgtagtcccactactgtagtctcagctactcgggaggctgaagcaggaggatggcttgagcccaggaggttgaggctgcagtgagcccaaaaatcaggccactgcactccagcctgggcaacagagaccctgtttgaagaaaaaaaaaaaaaaaaaaaaaagctaccatgtccagcttgaaacatgcagtttggaacatccatatggcattttgcaaatgtagttggtttagttttgctagttaacagtcagataaagtaggcctctgagcaccctgggggtgcgtgcttttgttccaggaagctgggcacagcctgaggcccaagacttggactggagaatatgctccaccgtacttaatccttttctctcccagaaagaagggggagctttggccaggcatggtggctcacgcctgtaatcccagcactttggtaggctgaggtggccggatcgcttgaggtgaggagttcaagaccagcctggctaacatggagaaaccttgtctctactaaaaatacaaaagtgagccgagtgttgtggcacacgcctgtaatctcagctacttggaggcagaggttgcagtgagctgagatcatgccactgtactccagcctggatgacagagcgagagtctgtctcaaaaaaaaaaaaaaaaaaaaaaagggaagcttcaaactcactgttcaaagtgaccttgaaggaaaaaataaattgttattttgctgtgttgtttgttattctctgccaacctttgccaagtacccatagaggcgatagctacagggcttctgggtgggagaagcagttgtttcccggcccagcggattgcatagcaagcagattagtttaactgcatgtgtgtattgtaggtcagtaaaaatagaaaggatgctttcactcacacttaacaagcaatttgagaaaaggtttgtctacatcaaagaatatatttctggccgggcgaggtggctcatgcctgtaatcccagcactttgggaggctgagacgggtgaatcacttgaagtcaggagttcgagaccagcctggtcaacatggtgaaacctcgtctctactaaaaacaaaaaaattagctgggtatggtggcacgtgcttgtagtcccagctactggcttcgaggctgaggaatgagaatcacttgaagctgggaggcggagttgccatgagctgagatcacgccactgtactccagcctgggtgacagagcgagactctgttttaaaaaaaataaataaaggatatatttcagctgggcacagtggctcatgcctgtaatcccagcactttgggacaccaaggtgggcaaatcatgtgaggtcaggagtttgagaccagcctggccaacatgatgaaactccgtctctacaaaaaataaaaaattagctgggtgtggtggcgcacgcctgaaatcccaggtacttgggaggctgaggcaggagaatcacttcaacctgggaggtggaggttgcagtgagctgagatcgcaccactgcactccagcctgggtgacaagaacgagactctgtctcaaaaaaaaaaagaaaaaaatctatttctgcttgggactaaatccatcttcccaccctcaagcagtctgttgtccactgaaaggttggcccctggagagaccttggagattatgaagtgcagtttacaactgatagaggtaatgcccagaggggtgcaggacgtgctgactgtcacgcaacaaattaatgtctggttgaggactgttatcatggcagttgggatcccagcagtagtggagatcggtggctgtttccatagtagcctcatatcactgccaaatctcatctgatctgagaggaaaagttttccactctgtggcctaattgaggtgaagcctctctctagaacgggtcacctccaggccttggctgaagccgtcttcttagaataccagagcaggccttagcattgtcttggggtcagagctaggtcggtaagcgaactgcttatcctaggatacagtatttttttaatgtatttttttattttattgctgtttttgccactgcagatgagactcaaagcaatgagcccagcagcaactggaaaaacagctactacatcttgtaattgagcctgttaattcctgagaaaatcagtctgtcttcagcctccagcagtccaggtcactgcccatttcccgcagctgaatacccagaagcgagcctcttggggtcccccataacccacatttagggtgttttctttctttttttttttttacacagagtctcgcactctcgcccaggctggagtgcagtggctccatcttggctcactgtaagctccgcctcccgggttcacgccattctcctgcctcagcctcccgagtagctggaactacaggtgcctgccaccatgcctggctaattttttgtatttttagtagagatgaggtttcaccgtgttagccaggatggtctcgatctcctgaccttatgatccgcccgcctcggcctcccagggtgctgggattacaggagtgagccaccatgcctggccttttttttttttttttttttttttttttttgtgacagagtctcgctctgtcacccaggctggagtgcagtgatgtgatctcacctcactgcaacctccacctccccggttcaagcgattttcctgcctcagcctcccaagtagctgttattacaggtgggtgccaccatgcccggctaatttctgtagttttagtagagatggggtttcaccatgttagtccaggctggtctcgaactcctgggctcaagcgatcctcctgccttggcatcccaaagtgctgggattataggtgtgagccaccgcaccttgcccaggggtgagtcttattagcacctgatcagatgggaactactgttctactttacagataatgcaactgaagctcagagaggtaaactaagctggtcaaggtcacagagcctggaagccagggagctgaacctgggtttgtcagactccagttttgtccacactgatggcttctctgctgatgctgccctaggacagctggtggctctcctgctgtgttctgaggacagagcatccctgaagggagggcgaggtgctgcgggtcagtgtggactgctgggagagggtctttctctgccctaaaatcggatgggctgccccttgcagtaagggcaggattgagagtgatgagccttgcctgggtgcagtggttcatgcctgtaatcccagcacgttgggaggctgaggcaggaggatcacctgaggtcaggagttcaagactagcctggccaacatggcgaaaccccctctccactaaaaatataaaaattggccgggtgcagtggctcatgcctgtaatcccagcactttgggaggccgaggtgggtgaatcacgaggccaggagatcgagaccatcctggctaacacagtgaaaccccgtctctactaaaaaatagaaaaagttagctgagtgtggtggtgggtacctgtagtcccagctacttgggaggctgaggcaggagaatggcttgacccgggaggcggagcttgcagtgagccgagatcgcgccactgcactccagcctgggcgacagagcgagactccgtctcaaaaaaaaaaaaaaaaaaaaaaaaaaaaaaaaaaaaaatatatatatatatatatatatatatatatatatatatatatatatgtatgtatatataaattagccaggcatcatggtgcactcctgtaatcccaggtactcgagagactgaggcaggagaattcgtttgaacctgggaggtggaggtcgcggacgagctgagatcgcaccactgcattccggtcctgggcaacagagtgagactctgtctcaaaaaaaaaaaaaaaaaaaaagggaaagtggtgagccttgagctgtggtgagctataaagacctttcctatgttagcctgactcaggccaagatcctgagggggttggaggggatcttaggcttttcagattttcctgcaggcttcttgctttgagcagatggtgactcactgggcagattctcctggtggagtcccttctgtcctggctgtagctttgtacttaggccatttctttgctgtaggcactcagaatctcagagccccaggcttgagataatttttctggtttaacttctgtaaagttacagatgagggacctgagacccagagaacaaggccttttccagggctgcaggccagttcccctttgggttgggcagtattgattgatactcttcctgggaaggtggcaatgcttacgggctttggatcagtgctaggctcatatgcttaactgccactgacaaggtttggagcccacgggcaaggtctttagtttctcgagctagtttttttttttttttttcgtgagacagagtccccctctgttgcccaggctggagtgcagtggtgccatctaggctcactgcaacctctgcctcctgggttcaagcgattctcctgcctcagcctcctgagtagctgggattacaggcgcccaccaccacgcccggctaatttttgtatttttagtagagatggggtttcaccatattggccaggctggtcttgaactcctgaccttaagtgattctcccaccttggcctcccagagtgttgggattacaggcgtgagccacagcggctggccttgaactagctttttaatccataaaatgacacctgggtgtgcgagacccggctgacattggctgatggtgtgcatcttcccaactctgtgttcagggatatcaggctgacatctctaagtcacaggtagggtatttacatcacggaaagtggcaaatgctacagctgaggccccttcctctctcctgcccaatgttcatattgactgggataattgtccctgcctcccagggttatcgtttcaagggtttcttggtctggtgagcatcgtatgagcagatacatacctggaaagcctcagcttggtgcagcaccttgcagcagctaacatttgacaagtagtacggccctactcacctctggacctctggacacggggcagatgtggggaggaggggccgaggagggggcggggccgaggaggaggaggtggggcttgaggacggggaggggtgtcgaggagggggaggcgggtcccaaggagtaggaggcagagtttagcaggaaaaggcatgtcctgaggaggaggagggggcagggctgaggtggaggaggtggttcctgaggatgaggaggtagggctgagaaagaagaggcggggccgggggggaaggggaggccgagggggaggaggtggggctcaggaggaggaggcggggcaagaaggaagcggcgggcctggatgggggaggcgggaccagggagggggaggcgggaccagggagggggaggcgggaccgagtaacaagaaggtgggacgggatgagtggtgggctttggtgtgtgccaggtggagtagctgtttcagccgcacccaggtggatttagaggctccaccagctgggcccagcaaagccttctggactaactggttcctgagaacagaggagggttgacagccttgagtgagggcggtgcttggaaaggccttgcgactctgataaggtggttgggtttggtcgggaatcctgcactttcattgacaagcctggctgcgtgagaaaggccagagaccttgagctagttggtcaagttcaggctgggtcttaacaccttcttgctgatactgatagtggcagctgagaatgttttaatacctgggacatttcctgcggcagccagaatatagtaatcttcctagtaaattacggtgaatatagtgcttaattatcagtgtttttttttttttttttttgagacgaagtctcgctcttgtcccctaggctggggtgcaatggcgtgatctcggctcgctgcacctccgcctcccgggttcaggcgattctcctgccttagtctcccgagtagctgggattacaggtgcccaccaccacacttggctagtttttgtatttttagtagagatggggtttcaccatgttggccaggctggtctgaaactcttgacctcaggtgatccgcccaacttggcctcccaaagtgttgggattacaggcgtgagccactgcgccggcagtgtgagtgcttcttatctagtaacatatctaaatcgtgtactaaacataagacgtagatgctgttcttatctctacttgactgatggagaaactgaggcacagaaagtgaagcgacttgtccacagctagtggctagcagagctgggattcttctagaaccagagtgggctttgctgtgggtcgtgcactggggaaagaatcaagtgtgtggtggtggtgaaggacttggaggccacccactctgtccttgggacagtgacttaacctaagcttcagttttgtcaccctgtgaggccaggataacgacacctgggggcctgtgggggagtgtgaagtgctcagcatgcttcgcggcccacaggcagggtaaaaatccttaagcggagagggacccacgttaggcaggtaaggacagatcagcatccccagggctgcctgagatgcttttggcacctgacctctttggaaggcctcaaaactcttttttttctttttttttttttttgagatagagtcttcctctgtcaccaggctggagtgcagtggcgtaatcttggctcactgcaacctctgcctcctgggttcaagtgattgtcctgcctcagcctcccgagtagctgggattacaggcacgtgccaccatgcctggctaatttttgtatttttagtagagacggggtttcagcatcttggccaggctggtcttgaactcctgacctcgtgatccacccgcctcagcctcccaaagtgctgggattataggcatgagccaccacgcctggctgagaaaagcttcaaaacttaatgaagaaggtccaccaggcgccaggagacagactgatgtcaaatcatatgcccagaaggtggaggaagaagcccagatgccagtgcctcagttttgatataatgtcacacaccatgcaagtcacatttttttttttttttgagacagagtctcgctccgtcacccaggctggagttcagtggctccatctcggctcactgcaatctccgcctcccgggttcatgcgattctcctgcctcagcctcctgagtagctgggactacaggcgcccaccaccacgcccggctaatttttttttttttttttttttttttttgtatttttagtagagacgaagttttaccgtgttagccaggatggtctcgatctcctgacttcgtgatccacctgcctcggcctcccaaagtactgggattacaggcgtgagccaccacacctggctgcaagtcacattttgagatgatcagctctttccttcttcatgggaagacccttggggaagtcacaccacactcagagcccactttttaacctgttgtgacaaagaatcatcccaggaagtggaggctagaagacagtctggccaccaggtgcctgtcacagctgcctcacctaggagcacactgcttctgttcctgctccctcctagctgactgttccccaccgagccacaggcagaaggcctttttgcctgtaagtgggaggatcttagtgtgccatggctcagaaccttccctcagaggcttgtcatctgtcccctgctttcctcagttgttactatgctactgtctttcacagatacccaaaaccacgttcctgccctaagcacatgctattccctcggccctggatgcccttccctctgctttcctcatgcctggcccttcgtgttaccgagcgctcagcttccatgtcccccagagagaccttccttggccatccaatctaaagtccaaccccttgcctgtcaccctggcaccccactcatctccttcgcagcccatctgggcttgggttgtgttttctttctttttttttttttttctgagacggagtcctgccctgttgcccaggctggagtgcagtggtgggattttggctcactgcaacctccacctcccgggttcaagtgattctcctgcctcagcctcctgagtagctgggattacaggtacccgccaccatgcctggctaatttttgaatttatttaattttttttttttttgagacggagtctcgctctgtcgcccaggctggagtgcagtggcatgatctcggctcactgcaagctccacctcccaggttcacgccattctcctgcctcagcctcccgagtagctgggagtacaggcacccaccaccacgcctggctaatttattttttattttttatttttactagagacagggtttcactgtgtcagccaggatggtctcgatctcctgacctcgtgatccaccctcctcagcctcccaaagtgttgggattacaggcgtgagccactgtgcctggctaatttttgtatttttatttatttattaaaaaatgtgtgtttttgaggcagagtcgtgctctgtcacctagactggagtgcagtggtgcgatcttggctctctgcaacctctgcgtctgggattcaagcattctcctgcctcagcctcccgagtagctgggattactggtgcccaccaccacaccccactaatttttgtatttttagtacagacagggtttcattgtgttggccaggctggtcttgaactcctgaccacaagtgatccacctgcctgggcctcccaaagtgctgggattacaggcatgagccaccgtgcctggccataatttttgtatttttagtagaggcaaggtttcaccatgttggccaggatggcctcgaactcttgatcttaagtgatctgccggcctcggcctcccaagtagctgggactgcaggtgtgtatcactatgtctggctgcttttttttgtttgtttgtttgtttgagttggagttttgctcttgcccaggctggagtgcagtagagtgatctcgattcactgcaacttccgctttccggtttcaagccattcttttgcctcaggctccggagtaactgggactacaggccacacgctgctaattttggtatttttagtagagacagggtttcaccatgtgggccaggctgatctcgaactcctgagctcaagtgatctgcccaacttggcctcccgaagtgctgggattacaggtgtgagccactgttcccggccagtgcctggctaatttttaaaggatttttcttggtagagacgcagtctcaccgtgttgcccaggctggtcttgaactccttggttcaagtgatctcctgcctcagcctcccaaagctctgggattctaggtgtatgccaccgtgcctggctggcaactggcttcttctggcctcttggccacaagccctgggtccatcctgcccgtggctgtcctgttccccatcatctcaaccctcctggcacagcggcccttctgagatggaagctgccgagacaacactgggcactcaccgcacaggttgtgggcaggtcctgctggtccaggccttttcccgtcataggaccctgcctctgttttccagtccatcacttattcattagttcatttgttccaacatgttttttccctcttatcaatgctaagaatcgtgggatgaacgaaccacattctctgtcctcaagatcttttcatttaagccaaggcctgaaggtcgaggtctttggggccagggaggagaatggtgttctaggcagagggaaccgagtggtgtgtgcagaggcatggagcccagagtttgcatatgtcccacgttgagggatgaggctgacagggcagggctttgtagccacccagagagacctgtggacttcttttcattttttttttttttttgagatggagtttcactcttgtcaccaaggctggagtgcaatggcacaatcttgggtcactgcaaccttcgcctcctgggttcaagcgattctcctgcctcagcctcccgattggctgggattaccagctaacgtgccaccacgcctggcgtattttttgtatgtgtagtagaccgggtttcacatgttggccaggctggtttcgaactcctgacctcaagtgatccgcccacctcggccttccagaatgctgggattacaggcgtgagccactgccctgcctcattttgatggcaatgaaagtcccttttctgttttattcaattacctatgaattattgtttttagtagagatggggtcttgctatattgcccaggctggtctccaactcttgggctcaagtgatcctcctgccttgacctcccaaagtgcagggattacaggtgtgagacaccatgcccgaccacattctactgattttacctaaaagattccctattggagggcagttcatttttaagtcctcagggggccctcatgccatagtgtttttttttttttttttttttttttttttctgagatggagtttcgcttttgtggcccagtctggagtgcagtggtgcaatctcggctcactgcaacctccgcctcccgggttcaatcaattctcctgcctcagcctcctgagtagctgggattacaggcatccaccaccactcccggctaatttttttatttttagtagaaatgttgttttactatattggctagggtggtctcgaactcctgacctcaggtgatctacacgctttggcctcccaaagtgttgggattagaggcattgaggcactgcacctgcccaccatggtgtttgtaataaaaatgcacagagcatttgttccttattctgagaagtgtaccgtggattgcgtgtggggcttactgggagcagagcgactcaccccagttacatggttagctgcatgtgggtcatgagtgtttcccagccctgcaaggtgtaaaggccctctctgtggccctgtagctgtgtcacagtgacaggctggcatggccctgcctctgtccctgctcgaatcaggctcttacgtaagcagagcccaccagccattcacagactgcctgagagaatgcagggctttatgcagtctcctgggtccttccaaattcttttttttttttttttccatttgaaagtgaacagggatcactggccagagcgtgggatctgggcttgtcctcagggtggggtgccaagttgggggtgggggtgggaagttaacacaagccctggggcttcaggaaacatctggaaacaggctgaagtcacggagctgagcctccaggctccttgtggggagaagctgtttccccagacacctcaagtgtctaactcaggaggtgggcagatgggtggagctgctgaatgaatgtttctcaggagctgggtggggttggaggattgcagagggtggggtgggggtgtgtgtgtgtgcagatactggaattcctgaggagacatgtatagttggaaacagtgtattgcctgtatactacttgtttcagagaatatatatatatatatatatatatatatatatttttttttttttttttttttttttttttttttttttgagacggagtctcgctctgtcgcccaggctggagtgcagtggcgcgatctaggctcactgcaagctccgtctcccgggttcacgccattctcctgcctcagcctcccgagtagctgggactacaggcgcccgctaccacgcccggctaattttttgtatttttagtagagacggggtttcaccgtgttagccaggatggtctcgatctcctgacctcgtgatcctcccgcctcggcctcccaaagtgctgggattacaggcgtgagccaccgcgcccggctatatatatatttttaaattgagacagagtctccctttgttgcccaggctggagtgcagtggtatgatcgcagctcattgcaacctctgcctcccaggttcaagcaattctgcctctgcctcctgagtagctgggattacaggcatgcaccaccccacacctggcttatttttgtatttttagtagagacagggtttcaccatgttggccaggcaggtctcgaactcctgacctcaaatgatcctcccgcctcagcctcccaaagtgctaggattacaggtgtgagccaacgtgccgggcctggagaatagtttaacaaaatctcccagccaggggtgggggatccacagaggacagagctggagaatccctatccaaatactggtgtggggatggtttctggagaggctggctgtgtggtcttggtctgaatgtgacaaaatacctccgagaagcctctgcccctgactcacccaggccacactcatcaccttgtcacctcatgtttgagttctccacacagcacttggcaccttctgataaggcatgtttgtgtaagcccctggctctcccctgtaacccctggccctggggagggtctctggatacttgtggaacgagtatgtgtatgtttgatagaggccactgtcttacggagcacacaggacaggctcagccgttcagccgcataattgatgcctgccctcaaaagtcactgcaactgatcaggacgaggatgcttgcatgatctcggggtgtgcggccattctatgggactggcaggtctggctttgagtgcgggtcctgagcttatagcatatccttggtgatagtagcagagggttctgctcttccatgaaccgggctcatcttttgctgctgcggtgtttggccattccttttttttttttttttgagacagggtctcactctgtcgcccatgctggagtgcagtggcacgatcacggctccctgcaactccaactcctgggttcaagggattcttgtgccccggcctcccaagtagctgagaccacaggtgcatgccatcacgcccggctaatttgaaaattttctgtagagatggggtcttgctgtgttgcctaagctggtcttgaactcatgggctccagtgatcctcctgcctctgtttcccaaagtgctgggattacagacaagagccaccatgcccagcacgtggcttgttttgaaccattgacacatcagaatctaggaactgcggtgtccttttcactccttcccttctctgttccctccctggtccaagcacctgagtctctgccctgagttgtttctaagcctctcaccactgtctctgaagccacatttgctcccttactgttcctctgtccccagcagagagatgattcttcaagaaaccaaagcagcctgtggcattccagcgattcctcattgctcaagggtaaaacctaaagcacttgtcttggctctgctccagcctgctgcttagctgctccccctaaaatttactctgttccagcctccgggtgtcacccgcttccccaaagctctgtgctaccccagggcctttgcattccccgccagggagcctcatgctggccctcagctgaaatcccatttcctcagcagggtcctcccgggcacacccactgtggccctctgggccctctgcaccgctgtctcctctccacagctcctggtacatcgtgaccccgtattatgtaataggtgctttgttcatgtccccttgagcaccagcaagcctagggggtgggggggatagcctctctcagtcgtgcgcactgtcatatcccggcccttggatcgctgcccgcacgctcttgttacacccgcctgactgccattcatcactgagcccagcagctggcacaggcaggcccgacgcagcaaggggcacagtccgtgttggttgcgtgcatggcgagtgcaaactgcacagttagcagaaaaggtttttgggagtgacagacacccctgcacacggttgagccctttgtaggtctccgtgtgacaagtacatccctgctgtgcttgggaaagggctgcggcttgggaaagggctgtgtgggttccctggcttcttcctgctgtccccgaggagcatcggaaatgggtcacaacgcagcaggtaaccgcagcctccctcaggcagagctgagtggctcagtattccatccaaggcctgatcagagctcctctgggccacatagagcccccaggacatggctggactaggagttgggaccctgatctcccttcctggctgggtcacgcccgccatgccactgactcttgggggacctgcctggaaggtgaggaagtgatccatgctagctcgtccctggggaccaagtccttctgcacctggggtggtcacaaatctgctttcagaaaaatcatgggggcggcgctgggggctactcagctgggaaatcattacagacatttccgatcatagatcacactgaaagtttttgggcatctaactcagaaggaattctagatttgggatttttttttttgctctgagaaaactccaccctaggccaggtgtagtggctcacacctgtaatttcagcactttggaaggctgaggtgggcggatcacttgaggtcaggagttcaagaccagcctggtcaacatgctgaaacccctcttctactaaaaatacaaaaattaaccaggtgcagtggcacgtgtctgtaatcctggctacttgcgaggctgaggcaggagaattgcttgaacccgggaggcagaggttgtagtgagcaacctcctgcagaaattttctttttatttatttattacagaaacagggctctcactatcttggcctggctgcatgcactaccgtgtctagcctggatttttctttctatgcttagaacctttggtcactgaaatatttcttaaacattattttttcttttctttttttaagacggagtcttgctctgttgccctggctggagtgccgtgtcgcgatcttggcttgctgcaacctccacctctgagggcgggttcaagccattctcccaccttagcctcccaggtagctgggactacaggtgcacaccactacgcccagctaactttagtatttttagtagaaacagggtttcactatgttggccaggctggtctcaaactcctgacctcaagtgatctgatctgcccgccttggcctcccaaagtgctgggattacaggcatgagccactgcacccagcctaaaaattaaatttcaatttgatcaacatgatagggtaatcagtgctaaccttcagtcataaacatgtattataataagatcctatgaaggagggaaacagaaaccaacgtcaaagcaaaaagagagccaatgttaaagagcttattcatagcctcttatttttttttaaagggataatggtaggtttcaaattactgaagcatttagactctagatagatttaacagagtcctgtaaatgtttatgtaaaatttttaataccgacagtaggccagaaatgacatcttttgcaactcttaaagcttgggtaaaaatattagttacaggcgtgagccaccgtacctggcctattttattttattttattttattttatgttttttgagacagagtctcagtctgttgcccaggctggagtgcagtggcatgaactctgctcactgcaacctctgcctcccaagttcaagtgattctcgtgcctcagtctccagagtagctgggactacaggcatgtgccaccacacctggctaattttttgtattttcagtcgagatgagttttcaccatgttagctaggatggtctcaaactcctgacctcaggtaatccacctgccttggcctcccaaagttctgggattacaggtgtgagccactgtacctaatatttttttttttttttgagtcagggtctcattctgtcacccaggttggagtgcaatggtgctattatagttcactgcagcttgggcctcctgggcttaagtgatactcttgccttagcttcctgattatgctaggactacaggtgcataccacctacagccggctacttttgtttttttttggtagaaatggggtcttgcgatgttgcccaggttggtcttgggtcttgggtcttggactctgggcctcgagggatcctcctgccttggcctcccaaccatgtgtgtgtttaatgggcatttcttttttttttttttttttgagacggagtctcgctctgtcacccaggctggagtgcagtggtgtgatctcagttcactgccacctctgcctcctgggtcaagcgattcttctgcctcagcctcccaagtagctgggactacaggcgcccaccaccatgcccagctaattttttgtattttttgtagagatggggtttcaccgtgttagccaggatcgtgtcgatctcctgacttcatgatccgccccctcggcctcccaaagtgctgggattacaggtgtgagccactgtgcctgggcctaatgggcatttcaaactttacatgtccaaaatggagcttctgatttttcctcttgaacctgcatttccccacccccttggtggcagttccggcctgtttgttacccaggccctaagctgtttgactctgctctttctctcatgcctcatgtccaaatgtcagcacatcccttagctcagcattctagaatttaaccacttctcatcagcctcactgccgttaccaggcctaagccaggggttggcaaacttaatccagctagcaaagatcttaggctttgcctaagggtctctgcagcactgctcatctctgtcgtctcttttttttcttttagagacggagttttgcactgtcgcccaggctggagtgcggtggtgcgatctcgactcactgcaacctccgcttcccaggttcaagcaattctcctgtctcagcctcccaagtagctgggattacaggcacgcatcaccacgtctggctaatttttgtattttggtagagacgggttcaccatgttggccaggctggtctcaaactcctgatttcaagtgatctgctcactttggcctcccaaagtgctgtgattacaggcgggagccaccgcatccaaccatctcagacatctcagcagcagtgataccactgtggcagccacagatgacatccagtgagcatggcgtgttcaatacaactctatttatggacaccaaaatttgaatttaattttcacatatcatgaaataggtttctttgattttttttttccatccgcttaaaaaggtaaaaacgtcatgtattttttaaaagataaaacaaaagttaaagccatttttagtcggttcaaaagccggcagtagaccagagttgccctatcggctgtagtttgctgacccatttgtctaagccatcattaccttcacagaattatttccacaacctttaattggacttttttttttttttttttttgagatggagtctcactctgtcgccaggctggggtgcagtggtgcgatctcagctcactgcaacctctgcctcccgggttcaagcagttctcctgcctcagcctcccaaggagctgggactacaggcatgcgccaccatgcccagctaacttttgtatttgtcatagagatggggtttcaccatattggccaggctagtcttgaactcctagtcttgaagaccttgtgatctgccctccttggccccctaacccggctaagtttttaaaagtttttgtagagataagggtcttactatgttgcccagcctggcctcaaactcttgggctcaagtgatcctcctgccctggcctcccaaagtgctgggattacaggcatgagccagcgtacctgacctgcactcagcttttggcctctttataaaatactgtaggccaggcgcagtggctcacgcctgtaatcccagcacttagggaggcttaggcgggcagatcacgaggtcaggagtttgagacgagcctgaccaacatggtgaaaccccatctctactaaaaatacaaaaattagctgggcatggtggcatgcacccgtaatcccagctactcaggaggctgaggcaggagaatcactggaactcggcatgcggaggttgcagtgagccgagattgtgccactgcgctccagcctgggcaacacagtgagactctgtctcaaaaaaaaaaataaaaaaaataaactatacacctgcccccttcaactgccactccctgtcccctttcctttctttcttctttccatgtcgcacgtcacctttgaacatattacatatagcgatttatttcattgtcactctttctttgccaagatgtgagttccatgcgagcagggatttttgtctctccttctatagctgaaccccacagtccttaacagggcctggcatgtgtcagtgaacaaacgagcctcagtttccttacctgcaaaagaggatgaatacattgtaaaggagatgattcgtgttgaggatgagcctccgtgcctggctggttgtgagtgggcgggtggtgttagctgccgccgcgtgtataaagcctgccacgtagatcccagtctaggctctttggcaagctgagctcatgggggtggactaacctgtctgctggactcgggcagtcgggggttggcccggatgagctcctcctgctcctccagtcagtttgtatctgcagggctcagcctctggcccccttccagcttcctggtccgacagcgccttcctgccctgagttggagagagacccaggtgtcgtccccaactgccacccagctgtgggtgcagggatgcagttctggaccatcccctgggggtctgggacctggggagttgagtgtttggcctttacactggagctccttgagggctggccccagcggccaggagtgtcagttttttggtttgtttgttttttagatggagtcttgctctgttgcacatgcagcagtatagtggcgtgatctcagctcactgcaaccttcacctcctgggttcatgcgattctcctgtctcagcctcccccgtagctgggactacaggcccgtaccactatgcccagctaatttttgtagagacagggtttcaccatgttagccaggctggtgtcgaactcctgacctcagatgatctgcccaccttggcctcccagagtactgggattacaggcatgaactaccacacccggccgctccttttacttatgaggacactcctttctcttattaagtccaccttaaattcaggataatgtcatcttaagatccttaattatatctgcaaagacactatttttttttctttttttgatatggagtcttgctttgtcacccaggctggagtgcagtggtgcgatctcggctcactgcaacctccacctcccaggttcataacgattctcctgcctcaggctcctgagtagctgggattacaggcacccaccaccacacccagctaatttttttgtatttttagtagagatagggtttcatcatgttggccaggctactctcgaactcctgacctcaggtgatccacccacctcggcctcccagagtactgggattacaggcgtgagccactgcacctggccaattattatattttgtgtagagaaggagttttgacatgttgcacaggctgcaggaattccctaattcctaagcagtccctgtgttagatggtcttgcaggcacacccatttactagttggagaagcagacaggcaaggcaggtctgacaccgccccctgtggcagtgcctctcagtcagcattgaggacgcgcccctgcttttctaggcccattggctgtcttagctagtgacaggaaaacatgcaggaggcattgccacagctgtaaaccctgcctgggccccgctgtggtatgagttgctgatagaccttttgctctggtacagcctggctgtgtgaggctgtggggcagaggccagcgggctgggtcctcaggccaggcagagaggctcagttcttggtgtctgctggaggatcgcatccagggtggtgggttttttgtttttttgtttttgtttttcttttgtttggttttacccttatttctttatttcttcctttcttcctctttttctttcctttctctctctctctctccccctccctccctccctctctctctccctccctccctctctctctctctctctctctctctttctctctttttttttttttgagatggagtctcgctctgtcgcccaggctggagtgcagtcagtggtgcagtcataactcagccttgacctcctgggctcaagcagtccatctaccttggcctcccaaagtgctgagattacaggcatgagccaccgcgcctggcctttttcttttctttctttctttctttcttttttctttttttttttttttgagatagcgtgtcttctgtcccccaggctggagtgcagtggtgcaatgataggtcactgcagccttgacctcccgggctcaagcaatcctcccagtctggcctcccaaactgctgggattataggcgtgagccaccgtgcccggcctgccttttcctttctctgttgcacatagccctgctctctaggatggaggcattattttattgtaggagctttgggcctgagcaagctgggtggacactcacatgggcacttccaggctacttaccttgggcgagggcttcctcgttcccaagccccagttttccaagccacgtaacaggcatcacagtctttttcttttcttttcttttctttttttttgagaggagtctcgttctgtcgcccaggctggagtgcagtggcgcaatctctggctcactgcaagctccgcctcccgggttcacgccattctcctgcctcagcctcccgagtagctgggactacaggcacccgccaccatgcccggctaactttttttgtacttttagtagagacggggtttcactgtgttagccaggatggtcttgatctcctgacctcgtgatccacccgcctcggcctcccaaagtgctgggattacaggtgtgagccactgcgcccggcccagtctttttcttatagggcctgggtgaggcctgggtggcagtctcagcatagtcctaggtacagggtgagcatctgatagatgtcacgtctgaatgaaacgggcgagatcagcgtcgctctgggtgggccagtgctcctcggaggccctgagggcacaaccgcagggatgggtgtaggctgtgggtaccactgagaatggggggcaggcccagggctgagacccaggttctccaacttcccactgtgtttgtcttgtgccatattcatcctctatgaatggctgtggctgctcgcccaagccaggagctcgtgcgtccgatgaccatcttccaaggctggattgctacctgctcgctcggggctctgctggatgggaacagcagctccagcttctccgggtcccgggctaccgctgcctctgcacctggccctggcctcggatccgagagcccagagacattggcattgagaccctggcacctctcgtcttgccagcacaggtagaagacaggagcagagcggtccagggacctgggagtgggaggtcagccactctcagcccttcctccccaccctgggtgacattctgcttccactgtggcgcctcggggaggctggtgcagccgcccccgggtgccactgagaaacgaggtcatacactgaggccactggggaaggtggtatttctggccgagcaggtgtggcctgtgcagggttcctggcagctgagccctaggtcttctcagccatcctggcattagcaggttgacttgatatttctggaagtgggaaggaaagggagccgagagggctgagccgctgagccggagtccagatgaatgtgccggagtctctgcatttgtgatgggggcgaggtgatgggggcgaggtggccggcgtggctctgggcatgatcgggccaggcctccgacctctatgctgggcattggctggacagggagctcaggcgatgagtgcagcagcgcttgtgcccggcgcggggatggtgagtgcctggctggccagctgcaggacctgtcaggccctttgtgtctttacctggggccctggttgcactgaccagggctcgcacccccagccaggcctcttgtgccccagactcgggagatgcttcctaccaggaagtgcagtcccctgcggggtccgagagagcctgccggagctttgagctcaacaggtgggctgtgcggcaccacatcagctctgcaagggggccctggaggcccatgtgtggtggggtatggcctggctttcaacatgcacgcgtggtcttctgggctctgggatttactgcttagatcttggcctcttcatctgtgaaacggagctaatggctcctgctccctccggctgctgcaggagagatgtctgggaagctgtggcagttccagccccgggcagggaacgtgaaataactgttggtcgctgttctcactcatcaccattaggcaggtcacgtcctaggacacacagaagtttcaggttcataagccatgggagatgaggccggcccagaatccaagcttcccgctctggcccgggtctgcccctcttctggggctgagagggcaggcaggtgccttgctgggtcctgtggtgtggactctgccgccagcaaggccattgaacctgcttgtttacagccgggagaggactgggaagcaccagtcttggcttgtttgtgaagctggggaagccgaagctccagaggccttctgtgcatggctgtgtgtgccaggccttcaggctgcgcctccaggggatgagcaggaattgcaggctcagctcttccagccttggctcaggtggtgcctgctcctccctccttccctgtacctctcatccccacacccactccactctcaggccacacccactcttcacctccacatctgtccagaatttcactgcttgtctctgccttgtgctttttttttttgagatggagtttcactctgtcaccaggttggagtgcagtggcctgacctctgctcactgcaacctccgcctcctgggttcaatcgattctcttgcctcagcctcctgagtagctgggactacaggcgtgtgccaccatgcccagctaatttttgtatttttagtagagatggggtttcaccatgttagcctggctggtcttgatctcttgaccttgtgatctgcccacgtccgcctcccagagtgctgggattacaggcgtgagccactgcgcctggccttgtttttttttttttgagacagggtcttgctttgtcccccaggcaggggtgccgtagtgtaatcaatcatggctcactgcagcctggaactcctaggcttaagcgatccttctgtcacagcccctgaggagtaggtaggaccataggtgcgagtcaccacacccagctaattttttatttttgttttttgagatggagtcttgctctgtggcccaggctggagtgcagtggtgtgatctcggctcactgcaacctctgcctcctgggttcaagcgattctcctgcctcagcctcctgagtagctgggattacaggtgcccactgccatgcccagcaaatttttttgtatttttatttattcttttttttttttttttttttttttttagacagagcctcactctattgcccaggctggagtgcagtggtgcaatcttggctcaccacaacctccatctcctgggtttaagtgattcttgtgcctcagcctcccaagtggctgggattacaggtgtgtgccaccacacttggctaatttttgtgtttttacacggggttttaccatgttggccaggctggtctcgaactcctgacctcaggtgatctgcccacctcagcctcccaaagtgcttggattacaggtgtgagtcaccatgcgtggacacagctaatttttataaatactttttgtggaggcagagccttgctattttgcccaagctggtcttgaactcctgggcttaagtgatcatcctgtctcagcctcctaaagtgctgggattccaggcgtgagccactgcgcccagcccacttttcacctctctatagctccctctttgctcccagcttctgccctcactcctccagtctgttccacccagcagtggcaagcaggtaaagctggggaagccaagtcttgaacctgagccaagtctcatccctcctctgctcaagaaccctctatggctgccacttcactcagagtaaaagctaacgtcctccccgtggcccacaaagccgtggcacagaccgccacatcacctttctgccctcacctcctcccactctctccctgactcactctgctcaggccacacaggactccttcctgctcagccacgctaggtatggtccagcctcagggccttggcacttactgttccctctgcctggactgcactggttcccccactgtctactggcctttgttcacacgccactttctcagaaagggcttctctgaccactctcaaatggccatcctcttggaggttgcagtgagccgagatcgcgccactgcattccagcctgggcgacagcgagactctctcaaaaaaaaaacaaaaacaaaaaaaaccacattgtgacctcccccacaaccttctagttttgttcacaactcttggtgacaaaacatgctatggctatctgcccccaccccctgcttgcccagcacgcacaggctagaattcaggtcccatgaaccccagaggctggcttggtttttttcactgccatatcccaggaactggaacagtgcctggggtatgggaaggagggagtcaggaatgaatgaatggataaatgaatgcaggctccctgagctctcttggctggtggcagggccagggttaaggtcccattctgcaccagagctgtctccgtccctgacatcggctttgggactgttcctgagccggctgctgcgggtgcccttccagcaggcgggagtaagtctgtgcggccacaagggggcagtggggagcgtcgcagcctccgccgcttgcagccagtcatcccggtggtgacgggtcagctcggcctctgcaccgaaagtatctcgctattgttagggtttgggttcactgtgaccagctgggcgaggcatcagtgcaccagctctctggccctggcttcctgtggatgggccccttcaagagcatggtcagcgtcccaggagaaggggcctgtggatcctgccagggtttggcccccttgtgcacctggcatggctgttctgctagtgttggtctaatcttatttatttatttatttatttatttatttatttatttattttgagacagggtcttgctgtgtcgcccaggctggagtgcaatggcataaactcagctcactgcaacctccaccgtcctgagttcaagcaattctcctgactcaacctcctgagtagctgggattacaggcacacaccaccatgcctggctaatttttgtatttttattagagacggggtttcaccatgttgggcaggctggtctcgaactcctggcctcaggtgatctgcctgcttcggcctcccaaagtgctgggattacaggtgtgagccatagtgccccgcctaatcatatttattctttttttaaattttgagatggagtcttgctctgtctcccaggctggagtgcagtggtgcgatatcagctcactgcaacctcctcctcctgggttcaagcaattctcctgccacagcctcctgagtagctgggattacaggcatgcaccaccacgcctggctaatttttgtatctttggtagagacggggtttcgccatgttgtccaggctggtcttgaactcctgacctcaggtaacccgcccaccttggcctcccaaagtgctaggattacaggcatgagccaccgtgcccggtcatcatatttattctttttttttgagatggagtcttgctctgtcgcccaggctggagtgcagtggcgcgatctcggttcactgcaagctctgcctcccgggttcgcgccattctcctgcctcagcctcccgagtagctgggactacaggcacccaccaccgcacccggctaattttttgtatttttagtagagatggggtttcaccgtgttagccaggatggtctcgatctcctgacctcgtgattcgcccgcctcggcctcccaaagtgctggcattacaggcgtgagccaccacgcccggcctatatttatccttaataagatttatcctaaactggggatgattacggtaaccctgtcagatggcagctggggacagcccactttgccatgagtagatggaagttcagagaggttgggtaacttgcccagggccacacagccaggaaatgggcaggtctgcttctctgggttgttcacccaccaggcgggcgggttcccaggagctgtgacaagtgcttagacaacgagagccccccttttcactcctcctgcccccattagtaatatcttcatgaccacaaagacagtgaagacgggctctgttgcttgcggcactcccctctgggcttgggaggcacaaacctcgcccctgctccctcttgcagggtgcgcttcacgccgcaccgtgtgtcctggctcttggctctgccctgacctcgtgctgcgacgagttgctgttggctgggccccgggaatcttgggcctcctggtgagaattcctctcaggctagtggaactgtcatcacagagccacaggccggcagagccaccagcctgtgccccaggccagagtgcctgcctgtctgcccgttcctgccctctccctgcccgtcgtgcctgaggctatgtggtctcaccccttgcccgtggccagtgctgggacctcgctgacaccagtagcccccctcccacaggtatcccttcatccacccagagcatctcagcccctcccagcccctccgagtggctccgtgggcttcctcagaaggtcctgtctgtcctccctgcctcaccgcttctcctggagatggggccagagcctgccacctccccgtctgtgctcaggatcccctgcctggggctctgttcagcagctgcctgtaccctctgcagccctgggcttcccctgggagcccctgccccctgttggcctcaggcctgggcaggcgtgtgtgtgtgtggcaggcacagagcagagattggggtggcagtggggtgtggggcgcggagccctcgatgaggtctcacattaggccctccctctgaggggtggggaacctctcctgctcctcccacccgactgtttttattttgatgggtatgtggggcctgtttgttacccctcacccctttaaacaataatttattgaggtgaaattcatgtaacatgaaactaaccatttaaaagtgaacagtggcattgagtgcacgtgcatcattgtgcagcctccacctctgtctcgtcccagaacattttcctcactctgaaaggagaccgggtacccagcagcagccactccccattccccccgcccagcccctggcccctccaatttgcttttctgtctgtctgctctgggtattttgcatagatatgggacctttgtgtctggcttgtttcctagcgtaacttatttcttttaccccacctggaatatcttatttaactttcttacttagaaataattataggccgggccaggtggctcacgcctataatcctagcactttgggaggccgaggtggtggattgcctgagctcaggagttcgagaccagcctgggcaacatggtgaaaccccatctctcctaaaatacaaaaaattagctggatgtggtggtgtgtgcctgtaatcccagctactctggaggctgaggcaggagaatcgtttgaacctggggggcggaggttgcagtgagtcaagatcgcactgctgcactccaacctgggcgacagagtgagactctgtctcaaaaaaaaaaaaaaattatagagacacagggaattgcaagaatagtatggagaggtctcctgctccccccagagcctttcagtcctctctctaggaggagatggccgacgagctggggatttggggcaggaaatgggagacggacggccgtcccactgaggactcatcctgcccaggtggccctagccttgggcatttcttgtctgtaggggcccctaggtgctgccttgcagcccgggcttacctccttgcaggtttgggcgtctcctctccttgggcctcaggctggcctgggcaccactgctgcagctgtgagcgtggcccctctctcgctaccccctcctgccgcagcccggcgtcctctcccagcagctagccgggaccccgatggccgtactctccctcttgggccctggtttggtgcccaggttggggggagcagggtacgatttcacccctcccactagcagctggctggacagggagaggggctggttgtattttaagctgttgagtggttcagcaggaactcggaggccttctctccctgtggacgctaggctgccttcctacaggccacacgggcttggaagcatgtgggcactgcctgcctggggcccaggaactattaatatacctgcagccacagggcaggccccgtgcccgcccagggccctgctgtgctaaccctttcccgtggatcccgccccgtgtcctctgtccctatcctacatatccccttggtggggcccaacgtcctgcgtggtgtgaccgagctctttttttctggcccctccatgtgccagctctttggccttgttatcgctgtggcttggaggagttcagtaaccttcccctagaggccacaaggccaggcagtgcctggagttgacagcagggactcaggaggccccgtgggccaggatttcctggctgctgggcccattcccaccctcctgtccaggaagtgggggcgagtgtgtcatggctggggaaataggcccccatgctgtggtgactgccaggccagcaggggagtggggatctgaaccaaacccacgggcaacaatgcctcctatcccatggggtgcctcccatctgtcaggggtcacctagtgtaccccatgcattgtctcaggggaccgtcacagtcctgggaggtagtctgcttcctacctgcccccttctgaggcctagagagaggtgacatgcctggggtcccccagggactacaaggcagggctggttacggttcccgagtgcaggccaccaagcccccttgtctcccgctgtcgttgggaatgtgcaggaggggtacccagcttctctggcttgaccgtggtgccctcatcttcaggatgggccctagctgccgtggcccggtctccctgggctctgggtgggtgggcctgccctgggatggccccagcccagaggtttgtttctgagcattgtgtcctgctccttttcctcaggcagcctctgggggcccccgctgggtttctgtgggtaggaagggtcccccaagaattgctggctggtggctgacttgggatcaggcctgcctgcttgccacgacccctgtataataggattgcactgacccctgcatagggtgggtcagatccccgggggctgcctccctccagccctgcccctctgcacccccatcgttcatcactggcctgggggctcagggagggctgggccagactcctacctcaggggctggcacaggcctggctcttggacgcaggaagcgccgggctttagtggggcgcaggtcctgggtgagggtgcagtgtttgggctgactcagtggaaagcctgccccacaggtggctataaggtgagaagtgggtggggaggaaggttggggagacctcatcagcccaagctggaggcggttgcctaaaacttccacacaccccgatcctttccacacttcgagagaggctctctgcacccataactccagaatctgtcacctccctggtaacacaaatgcacaaggaaaataatccaaagtgtctcttacagctcagaaggggaaatggatgatctgtctcgcggattctcaaaatagctgggatttctccaagcccagtgaactccctaggcctgagctgcgggctggggcctgcacggcccgctggcctctcactctcctctagccactggctctgtgcagggcgggggctgggaggtgttgtcatgcctgcccctggggctttccctgtgctggtgccgttgagggttttgaggtgaccactcaaaagctgctttcagggcagcctggctccccggggagactcccaagcccccctcagagaaggtctgtggcatggctcctggggggcgcagtctggggtggttttatatttagctgggctgtggctgtggttgccactcgggttacatctggcacagaagtcggcagtgccagggccggcacgggctcctttccagcaccgcggcagaatttgatcgcgcttgcccggcccagggctgcttcccgtggggaggtcggtggtgggggctgacggccggcagctggggctgctggccaccgtgggcagagccgagtggcagggctggtggcaggcggcatggacttgaacttgagcttgttggcccgggaggccaccccaggcctcctccctggcctcaatgggctccccaggcccacacccccaaaggtggccaagaaacctaaaaaggctgttctcttcttcgaggtggagattctggacgcaaagacaagggagaagctgtgtttcttggacaaggtaggactggggcgtgggctgcactgggccaagggcactgggcccgggaccccaatccttatagcccaggagctgtccagtggggccctttgtgccccaccccctgccctatggaggggtatgccctcacttggggtagggtggatagccatgtcccctgggtgtggcggggaaatggaggcacaggagtctcagtggaccctgcggggattttggtcctgggagggcggtggaggagtgagccttgcccctgctgaggccgggcctgggggaaggggcttgcgctgtccctggggaggacagagggcctttgctcctgggagagtcatgggtgagaagtggagaggaggggcagagaagcaggcttgccttcccatgcttaatccgccactagccgggctgggggcctgctggctgagggtaaaagtggagccccagacccctgctgtcactgcactggcagggccctcggtggtccttccctgactgcaggcagaggcctggaccccagcccttcccccttcccatagctacagcccaacccccagcctgccatcccctttagtacctccccatcctgagtctgggctccccgcagagctgacgtccctgcgcctgtgcttcccccaggtggagccccacgccaccattgcggagatcaagaacctcttcactaagacccgtgagttctagtcccggccacactgcccctgcaacccctttgaccagggaccttagggtgggagggatcccatcctgcacccctctcccaggggcctgcagagatgccccagtgtggcccaggcttctggggcgtgactggggcaggcgcctccacgtggcactccgcaggaacgcccttgctaggctctgggaaggacaagatcctgcttctgcccgcgctcttctggcttgtgtcctgaaaccgcacaagcctgagggtttgcccccaggtgggaggagctgtggagtcctggggtccttgcaccctgggaaccctgagaagctggcacagtggctgggcagcggaccggctgagccctgccaggctgtgggctgtaactgccctgttctccccgcagatccgcagtggtaccccgcccgccagtccctccgcctggaccccagtgagtacagctgtccactcggcccgccccctgggctcctgggtggcagtgggagaaggcccgggtagcccctgagccctggcccgcctctctgcagagggcaagtccctgaaggatgaggatgttctgcagaagctgcccgtgggcaccacggccacactgtacttccgggacctgggggcccagatcagctgggtgacggtgagtcctgaccctacccacggcctcttttcccgtcagccacgttgggtgactcatcttgcccccctctactctcaggtcttcctaacagagtacgcggggccccttttcatctacctgctcttctacttccgagtgcccttcatctatggccacaaatatgactttacgtccagtcggcatacagtggtgcagtaagtggggcaggtgggaggagggtaggggaaggcagaagacctgccggaccagccccagctgagcctgctccccccgaccagcctcgcctgcatctgtcactcattccactacatcaagcgcctgctggagacgctcttcgtgcaccgcttctcccatggcactatgcctttgcgcaacatcttcaaggtgagagcccgtccccgcctcacccctaagccccgcctttctgccccaccccgccccgcccccaccgagccccaccccaaggcccttcctgtctgccactacgccccagcagagccctacccctaggccccgcctaacctccccagccccgccctcgcagagcctctagaccccgcccgtcctccccagccccgcccccgtcgggcccctaggcctgcctatccaccctagtcccacccctaggcaccgcctatccccccagccccgcccctgcagagccccgccccagtttcacccctaggcccctcctgtccaccacgccctcacagagccctgccctagcctcaccccttggccccgcctatcctccccagccccgccccaaggcccctcctgtcctttcccaccatgctcccaggcccctcgggatgagacatgggcagcatctgccttgtccggtgctggcccaagtcccatccctgccctgctccctttcagaactgcacctactactggggcttcgccgcgtggatggcctattacatcaatcaccctctctacactccccctagtaagtggcctcagaccatccttccctcccccacggtccccacccagcgggtcctcccctcatgggctcccctccctgcttcctcttcagcctacggagctcagcaggtgaaactggcgctcgccatctttgtggtaaggaggctgggtgtggggacggggtcgggggagtctgggcggccctaggctgatcctgcttctctgacagatctgccagctcggcaacttctccatccacatggccctgcgggacctgcggcccgctggtgagtgcctgctgggggcagggggacagctgggctgggtgagggggtctgactttctccttctgtcctgcctgccagggtccaagacgcggaagatcccataccccaccaagaaccccttcacgtggctcttcctgctggtgtcctgccccaactacacctacgaggtgaggggctgccttacccctctctgccctgggacttggggtcccatgtggagggaccagcccctaggatggggcgcctggctgggcagctgcttttgccgcctgcactgcgagcattgggaggtggagaccgcggcctctctgctgtggtggcggggaggcgtgtgccgctgggcttccgccgtatacagccccgcctccgctggaattgggttcccatccctgactcagaaagcaggggcggcgggaggtggctggctgagtccaggacagccacatacacgggttgcgaggctgcccacgctcactctccgcccctgcccacaggtggggtcctggatcggtttcgccatcatgacgcagtgtctcccaggtgagcctgccgccctccctcggcggggccctgcccctccgggccggcagcccctccctgacgcccgttctttcctgcagtggccctgttctccctggtgggcttcacccagatgaccatctgggccaagggcaagcaccgcagctacctgaaggagttccgggactacccgcccctgcgcatgcccatcatccccttcctgctctgagcgctcacccctgctgaggctcagcccctcaacccggtggcattctgggggaggagtggggcccacagctctccagcacccggaataaagcccgcctgccccagtcggactcgggctctgtgtgtttctttccggggttggggaccaccacactgcccttcactctctccccactctcgcgtcggagcagtaagaggggactctggttgaggggcctgaaggcttttatttgactggtccatagggtggggggtgcaccccctacagggccaccttggggtccacttccccgggtccctggcctttggccaactctgccgccttcttctcccgccgcttcttccgctggagcagcctccgctcccgctcaaactccttcatgcgcatcacatagctgggggaaaagcacgagaggggctgtcagggtccctggccaggacacgccccccaagccctgggaagcggaggggccgtcccagagcactgtgggggaggcctctgaagaagacatgtccgagtgcctgtggcttgggtctggggtctgcccacgcaggtggcagggcttcccactggaacctgggcttggccactcccctaggtggcttcagccacctgccctgtccccatcaaacaggcccctagagagccctctctgggactaaggtggggcccggctagaaacctcagtggcagttcaggtccctggcctctggagccacatcctgccaggggccaggcctgggtggggtgcaggctgtgggtgttggcgggggtgggaggggggcttgggcgggctgggcatgtggggggcttgggtgggccaggggtgtggaaggctgggggtatggggtgttgcgggccggggtgttgggggctggtgtgggggtgctcactcgcggtgctcgcagtagtcccagtcgtgccgctcctgcttgcaggccaggaagttggggaagctgtcacgcttgcacttgagcagccggatgaggtggtgggcgcagtagtcccgcagctggagcctcagctgcgcgtccatcatctcctgctgtgtggccaccatctctgcagggagtgggcggggctcaaccaggctggaggctccccaccccaattccggggatccccaggggaccgaggcacacggcttcaggaaggcacggcttggggtgtcccccattcacatccagatggcagtggatggcagatgcctttgacggatgcactgtcctgaaggggcctccttttctaatttgcacaaaggcaactccagacaccaagggccagacaggagaaggtggctccccatcaccctgaggcacctcaacatcccgtgccggatccttgcctcccctcccacagggatgcccgtccccagctctctacagccccgctctccagagtccgagttcagaatccaccttctcccagagtaaccctcagcccctccacctgcacctggggctccaggcagcactcccagcctttcttgtctgcaacccacccaaggcccagctctgcactggccggcggcgtggcctctctctcagcctcagaactgaccatccggtcatggaagttacccgagcatccactgagctaacagtacctgtaaggtacttaggcgtgggctcagaagacagctggactagtatctgggtcccggtgccccactcacctagcaaacctgactccggacaaatcaaccttcaggagggggccgatgggagcatgaggaatcctggacactcaccccggagcctgtgcctggcgatcctgcactcgttccccaccgcctccctcagacccagcctccctagccctcctgacgtccaccacatctttctcggtcccagctccttcccatctgcgcaagtgagacgagatatattcacatctcaatggcagtcgtcccctgctggcttctctcccctttgcttcccagctgcgattctctcatcccactgaggcccaggtcctcctctcctgccccttgtcccattccctggcttctgccctaccccctcactgcccagacacgggctctcacagggccacccaacagcccaggaccccagcctcccgcttccttctttcctgtggctcctcccacatccctcctccccaggtttcctcccatctctatggctgccttaccttacgctttgttctgggagcctttttcttttcttttgagatggagtctcactctgtcacccaggctggagggcagtggcaagatctcagctcactgcaacccctgtctcccaggttcaagcaattctcctgcctcagcttcctgagtagctggaactacaggcgcctgccaccatgcccgactaatttttgtatttttagtagagatggggtttcgccatgttagtcaggctggtcttgaactcctgacctcaggtgatccacccaccttggcctcccaaagtgctgggattacaggtgtgagccactgtgcccggcctgagagcctttttctctgctgccgccccgtatgtagatgagcccgatgtggtccctccaccccacacctcgcttgagccccaggcctgggtatcacctgcagcccctggctgttccctatctgcacttggagctccaggtggcaatcctagactcctccctcttttgtcttgaacttataatcagctagcagcaaggactttagactgcctactgtgtgcttagtggtggggatacagcaggcaacacaacacacaagtgtccctgccctcagagggagacacagaacagacagaagacagagcaccacagcgtgtctggcagtgcttaagtattagggagaccagcctggggagcacagaaagatcccatgtccagaaaaaaataaaattatctttgcacggtagtgcacacggagtatccagagctactcgggaggatcgcttgaacccaggagtttgaggctgcagtgggtgataaccaccccactgcactccagcctaagcaacagagcgagagcccatctctacaaacaaataaataaatatgggccaggcgcggtggctcacgcctgtaaacccagcactttgggaggccgaggcaggtggatcacttgaggtcagaagttcgagatcagcctggccaacatggtaaaaccctgtctctactaaaaatacaaaaatgagtcaggtgtggtggcacgcacctgtaatcccagctactcgggaggctgaggcgggagaatcgcttgaaccgggaaggcagatgttgcagtgagcaaagtgactggctgaaagggggtggaaaggaggaaagagagggcaggggacagtgatctaggagggagggagagagtgaaggatccgggaggtaagagaaaggccaggcaccataaagagtccactggagtaccaatcgggagaccggtcagcagggactgcaggaatgcgccaccacacccagctaattaaaaaataaaaataaaaaattgtagagacagggccttgctatgttgcccaggctgttcttgaacttctggccttgagcaatcctcctgcctttgcctcccaaaccgttgggattacaggcatgagccattttgcctggcttagagctgtttttttcttatctccccgccccccattatgttcagttgcacggggataggcaccaaggaagggaaagaggtgagtttatccagagtaagcaagagagaagggcagcaggttgctagcgtttgcaaagctgatcttggggaaagcaaggtatgtgaggcagtgggaggaaggtggacggaccaatgaactgcaggttcagctggggcggaaggactacccggagtgtggacactggagtgattataccatctcccaactttctctcaaatccaggctgcttagaggtctctgtctcaagcttgtcgcccactcagtagacagtgtgaccttttgaccaaccaaaactgattgtgtccctcctctgcttagaagcttggctctgccacctctctttggtcaacccctactcatgccccttcacatctttgttttgttttgttttgttttttcagacagtctcgctctgtcacccaggctggagtgtggtggcctgaccttggttcactgcaacctctgcctcctgggttccagccaattctcctgcctcagcctcccagacagctgggattacaggcatgcgccaccacacctggctaatttttgtatttttagtagagtagagacggggtttcaccatgttggccaggctggtctcaaactcctgacctcaggtgatccaccggccttggcctcccaaagtgctgggattacaggcataagccaccgtgcccggcttaatttttgtattttgtttttgagatggagtcttgctctgtcgcccaggctggagtgcagtggtgtgatctcggctcactataacctctgcctcctgggttcaagcgattctcctgcctcagcctcctgagtagctgggactacaggtgtgcaccaccacgcccctggctaatttttgtatttttagtagagacagggtttcaccacattggccaggatggtctcaatcccctgacctcgtgatctgcccgcctcggcctcccaaagtgctgggattatgggtgtgagacaccatgcccggcctcaatttttatatttttagtagagatggtgtttcaccatgttggccaggctggtctcaaactcctgaccccaggtgatctgcccgccttagcctcccaaagtgctgggattacaggcatgagccaccacgaccggccacccttcacgtctttgtttccagccactgcctcttggaagcctgctttgacacccccagctctgcctgattccacaatctttcccactgtgctgagttctctggagacagtgcctgcatccctccagttccctgctgtatccgcggtgcctaatgtgggacgtggcccagagctggtgctcggtatgcctgtgatattactacattaaaagcaaaaacaaacacacgaaccaaaaaaccatcctgggcgtagtggctcacatcttcaatcccagcactttgggaggctgggcagaaggatcgtttgagcccaggagtttgagaccagcctgggcaacacagcaagacccccaactctacaaaaaataaaaaatcagtctggcatcctggggcgctcctgtagtcccagctactcgggaggctgaggcgggaggatcatttgagcccaggaggtcgaggatgcaatgagctgtgattgtgccactacactcagcctgggcaacagagcaagatcccgtctcaaagcaaaacaaagcactttgcaggacagtatttgcagctcgaatcttccttatttccttgtgcataccccacaattgcagtgacatcaggaagggggtacaatgaacgtgtccctgccctcccatgactccccacgtcccccaagacttggcccgaggccgggcgtggtgactgacttctgcgatcccagcacttggggaggccgaggcgggcggatcacttgaggtcaggagttcaagagcagcctggccaacaaggagaaaccccgtctctactaacaatacaaaaaagtagctgggcatggtggtacacatctgtaatcacagctactcgcgaggctgaggcaggagaatcgcttgaacccgggaggtggaggctgccagtgaatcgagaccaagccactgcactccagcctgaaagaaaaagcgagactccgtctcaaaagaaaaaaaaaaaagactcgacccagctctgcgcgtcgcattcctgcccgaacccccacttgtcgcctcacttttgctccctggcttttgctcaagccgtgcccttgggctggaacgcctccacactgaggtggggtcatgcacgtcctgtggactcctagtctagacccaaacccagatacaacacctgaggttagagcccagccctggggtgccagccctggggtgccaggtgttcaggcacccgcgccccacgccctctggctgcgcctgcgcactgggcctcaccgcgctccttgcgttcggggaagccgtagtctggcgggaaggttggcatctgcagggggtcgggctccaccgaggcatcgcccaggtagcgccggaccaggtgggcccccatggctgcagtcgctgcagatccctgcagcagccgagggtcacctagctcctacccggaaccactgacccctcagtcagacacagcttccgggtcatttaggcagctgcggagatcatagagatgaaggactccagaggatcgctccggtccgcctggcgtcacctcgcggacaggcggaggcgggacaggtgctgtgtctcttcgcaggatatggttggacccgagaggggacttccctgagcctggaaatccatctgggcggggcagaaggggacggtgtgggactgaggcctccctcgaccctatctggggctcttctggtagcccgaggctaaagcacatattaaaattatttttcatatcattttccaaaaagttttttctttgaaaacattcaaatttctcttaaaaaaggcacgatatctattatatcgttaatgtatgtaattttgcataaagtcactttaagaattttttgtttttggagacacagtacctgtcgcccagactggagtgtattggcgcgatctcggctcactgcagcctccacctcctgggctcaaattctcttgcctcagcctcctgagtagctgggattacaggcgcccgccaccacccccagctaatttttgtatttttagtagagacggggtttcgccagttggccaggctggtctcgaacccctgacctcaagtgattcccccgcctcagcctcccaaattgctgggattacgggcatgagccacagtgcctgtccaagaaagattttgataaatttaatttaaataaaagttattcataaatacagttattattatattattattttttgagatagggtctcattctgtcgcccaggctggagcacagtggcacaatcatagctcactgcaaccttgaactcttgggctccagggatcctcccgcctcagcctctcaaagtgttgggattatgggcgtaagccactgtgcctggtcaaaaacaattatttaaagctgaaatttcaaataaattatatatatatatgcaatctttatacaattttaaaatatattaatatctaatattaatatctaatatatatttttccccagtctgacaaagcatgtattaggcatctactgtatggtatgctgggtccagtggtcagacagaaaggcagacgtggttcctgtctttcaagcttacagtctaatggaacagaaaaacagtctaatggaaaaaaaaaaatatgggccagggcagtggctcacacctgtaatctcagagctttgggaagctgagatgggaggatcgcctgaactcaggagtttgagaccagcctgggcaatatagggagactctatctctacaaaaaaaaaaaaaaaaaaaaaagctgggtgtggtggtgcacgcttgtagtcccagctactcgggaggctgaggcaggaggataacttgagcccaggagttccaggctgcagtgagccgtgatcccatcactgcactccagcctaggcaacagagtgagaccctgtctataaaaattcccaggtgatgtgatgttgctggtctagtgaccagctttgggagaattactcaactagatctttatgtgttgacatggggaagtggctgctgatatattaagtgaaaaaagcaagctattgagaatagacaactggcaatagagacttttctttttctttcttttttttttttttttttgagacagagtttcactcttgttgcccaggctggagtgcagtggtgtgatctcggctcaccgcaacctccgccttctggtttcaagcgattctcctgccttagcctcctaagtagctgggattacaggtgggtgccatcacggccagctaatttttttttttttttttttgagacggagtcttgctccgttgcccaggctggagtgcagtggcgcaatctcggctcactgcaagctccgcctcccgggttcacgccattctcctgcctcagcctgccgagtagctgggactacaagcgcccgccaccacgcccggctactttttttgtatttttagtagagacggggtttcaccgtgttagccaggatagtcttgatctcctgaccttgtgatccgcccgccttggcctcccaaataatttttttgtatttttagtagagacggagtttcatcatgttggctaggctggtcttgaactcctgacctcaggtgatccacccgcttcggcctcccaaagtgcagggattacaggcttgaaccactgcgtccagctgagaccttctttccagggctacctgtgtgacctgtccctatctccaggccaccacattaatctgtgattcttgtgcccttctagactcaagggggcagcattcacattgtgatctctatgaatggtgcttctggagttgtgccgtgcacagcctgcacagctgcatccagtaaccctgacgtgttctgggcgtgtctccttaatcttcctttctctgtgcttcagctgctcacccagaggtcagagctcaaagggagtccagagaggcaaattacagtactagctcactttccctgtgtgacccccagaagtgacttcatttctcgcagactgagtttactcatctgtaagatgaggtttgtaatacctatctcataatgttcccagccagcgagggctcccctcctcctgatggattccacccctttcctggctttatttttttattttttcaagacagggtcttgctctattacccaggctggagtgcagtgtcatgatctcggctcactgcagcctctgcctcctgggctcaggcgaccctcctgcctcagcctcccgagtagctgggattccacgtgcgtgccactacgcccagctaatatttgtatttttgtagagatgaggttttgccatgttgcccaggctgatctcaacctcttgggctcaagcaaaccacctgccttggcctcccaaagtgctgggattacaggcgtgagccatcatgctggacctttattttcctccttcgcacttagcaccatttaaactgcgatccatttgccttatttattttgtttattattggtctcttctctcaactcagctctgtgaagcagggaattttgtctgtcttgttcactgccatattactgcacctagaacagaactggcgtgcagtagatgcttagaaaatatttgttgaatagactgggtgcggtggctaacgactgtaattacacggctttgggaggcggaggcagaaggatcacttgagaacaggactttgagaccagcctgggcaatatagggagacccctgtctctacaaaaaaataaaaaaattagccgggctggtggcatgcacctgtagtcccagctacttgggaggctgaagtgggaggatcgcttgagcccaggaggttgaggctgcagtgagcaatgatcatgccactgcactccagcctggtcaacagagcaagaccctgtctctgaaaataaatacagaacaatacaataaaataaataatttgttgaataaacacaggaataaataaatagagaaggtggaagaatcagatggttgcatcaaaagtgcttagtgcctggcatccagtaggtgctcaatacatgctcactattgtttctttcatccaggtcacagtctggcgctagaaagccaaacaaaggaggctactgtgaccagtcatttcaccagaggctgaagggattcaagccagggatgactggggttgggcgtggaggcatgtggcccattccattctaaacttccaggactcaaatggttcagcctggcctagccttaccgagcactggggacctggggggaatgatactgaaagggccattgtctggggtgataactgagattcgttgtcttacagcggaggaaatcaaggacgtggacacacaaggagtgaggttaagagaggaagtttatatttatttatttatttttttgagatggagtcttgctctgtcacccaggccggagtgcagtggcacaatctcggttcactgcaaccttcacctcctgggttcaagtaattcctgtctcagcctcccaggtagctgggattacaggtgtgagtcaccctcctggcctatttacttattttttgagatggagtcttgctctgttgcccaggctggagtgtaatggcaggatctcagatcactgcaacctctgcctcctgggttcaagtgattctcgtgcctcagcctctgagtagctgagattacaggtgtgtgccaccacacctggctaattttttgtatttttagtagagatgaggtttcaccacgctggccaggacctcctgacctcaaatgacccacccgcctcggccttccaaagtgctgggattacaggcgtgagctactgcgcctggccaagagtgaaagtttaacaggtgaaagaatacctgtctctgctgcagagagaggggtcctgaacaggttgctggttttgaggtgaaatgcagggcgttttatagatgcttggtgagcaggcagtgtctgatttacatagggcttgaaagattggttgggccaggtgtgctatttgcatagggcgcaaaaactgtttaggactaggtgtgccatttgcatagggcgcgaatttctggaagtccccccaccttaatctttcattatgtaggtaggttctctgcctggcctgcaccatcatgcccgtttattttttatctatttatttattttttactgtacacgtgataataaaagggaagatggagactccatgttgaacatgcctggccctcaggtagcccttttctattggcacagctgctggcattttctcatgcaagcttccagcttgcttatctatgtttgcagctcaatttctcaggatgctcgttgttaaaaataaataatttcttgggctgttttttttgtgtgtttgtttgttttctttgagctggagttttgctcttgttgcccaggctggagtgcaatggcgcaatcttggcttgctgcagcctccgcctcccgggttcaagtgattttcctgcctcagcctcctgagtacctgggattataggcacccgctaccatgcctggctaattttttgtatttttgtgtgtgtatatatatatatatatatatatatatatatatatatatatatgtattttttttttttagtagagacggggtttcgctatgttggtcaagctggtctcgaacttctgacctcaggtgatccgcctgcctccgcctcccaaagtgttgggattacaggcgtgagccactgagcccagcctgggctgctttttgttaaaagggaagctctgacaaggactctcttaccctcactagctgcctaaataatgtctttctatctcctgtatcaatatttgggtgagggtgattttaggcagcatgtgggggcctccatcacccatcatctgtatccttcctgtttttttctttatcaaccacccaccaaggagaccttcctgtgtcccttgcccaccgctcccaggggacctgttttttttttttttttctttgagacggagtcttgctctgtcacccaggctggagtgcagtggtgagatctcggctcactgcaatctcggcctccagggttcaagcaattctcctgcctcagccccctgagtagctgggattacaggcgcccgccaccactcctggctaatttttgtatttttagtagagatgggatttcaccatgttggccaggctgatctcgaactcctgacctcaggtgatcttcccgcctcggcctcccaaagtggtgggattacaggcatgagccaccgcacctggccaggacccggtttattggccacagttccccgcctctcccctttcttccttcccttgctctcctgtcctgccccatctggtctgctccagaaggggctgcattcgcactctgtgagcagagcagcctcagagggcccacgtgggacctgaggtggggaaggaaattctgagtggtgtctgcaccttgccacagtctgctggttgggagaccagatgctctgggggattcagtttcagggaaggaggaaaaacaaggtcagtgaggcctcagcagaagactcccagggcaagccccgcttctgcttatggggcagacagaacacttgtctttaatccaggcaggagtgctactgacacccagcgtttgatgctgtgtgcattgagagtggctggctggtattggagggatgagagagcctggaggggcggggctttaggggtggccttagacagggcttggcaggcaggaggtcactcactcattcaacaaacattcattgagcacctaccgtgtggcaggcagtgaacaagacagacacaaatccctgccctcatggagttgagctgctaataggtggaagacaggcagagaacaagattaggaagtgaggtatgtgcaatgtgagatatgataagactgtgacaatggttaaggggaaaaatggcagacagagtggatgagaagggatggtctggaattttatttttattttatttttttgagacagggtctcactttgttgcccacgccagagtgcagtggcacaatcacagctcattgcagccttgaattcctgggctcaagggatcctcctacctcagcctcctgagtagctaggactataggtgtgtaccaacatgcctggttaattttttcattaatatcacagtgcgtaaaccctgtgatatgataaatatcagagggatatttcattaattttgtagaggcagggtctccctaccttacccaggctggttgttcatcatattggtcaggctgttcttgaactcccgacctcaggtaatccacctgcctcagcctcccaaagtgctgggattccaggcgtgtgtcaccatgcccagcctgatcctcctctttattgcaatcccccatgtacatgtgattcctttctccttctttctttttcttctttttctgtttctactttatttttatttttatttttttgagatggagtttctttctgtcacccaggctggagtgcagtggtgcgatcttggctcactgcaacctttgccttgcaggttcaagcgattgtcctgcctcagcctccgtggtagctgggattacaggtgcacaccaccacgcccagctcattttcgtatttttagtagggacagggcttcaccgtattggccaggccggcctcaaactcctgacctcaggtgatcccctggcttcggcctcccaaagtgctgggattacaggcatgagccactgtgcctggccatctacttctttttcttttcttgtttttagagatggggtctcactatgttgcccaggctggagtgcagtggctattcacaggcgtgaccataatgcactgcagcctcaaactcctgggctccaggactcctcccatctcagcctcctgagtagctgggactataggctcacaccactgcacctgtgtttttcttctttttctatttgtgactatctaacataacttctaatgtagttgagttatttattttattcactctctttctccctgttgctgctcccatgggtaaaattttttgttgttgttcaccagtgtatttcggttcttatgtgttagagcctaacacagagtaggtggtcagtacttatctgttgaatcaatgaatgaacaaatgaatccctgtttgacatatcaggagactaatgctcagagatgttgttctgcacccccaaggtgacacagcaagaatgggcctgagctggaagcagcctgggctcatagccttgttatttcagtgaatggggctggattccaacatctgttcctgaatacctactgtgtgccaggtcccgagggatggtattggccaggtagctatcacccctataccatgagaccacccagcctttattgtaagaaggtccccttacctctaagagtgctttttttttttttttttttttttgagacagagttttgctctgttgcccaggcttgagcacagtggtatgatcacagctcactgcatcctcaatctcctgggctcaagcgatcctcccacctcagcctcccaagtagctggatctacaggcatgcaccaccatgcccagctaattaaaaaaaattttttttttgagagaagtctcgttcttgtcccccaggcttgagtgtgatggctcgatctcggctcactgcaacctctgcctcctgggttcaaatgattctcctgcctctgcctcccaagtagctgggattaaggcgcctgccaccacgcccggctaatttttgtattttttagtagagacagggtttcaccatgtttgccaggctgatctcgaactcctgacctcaggtgatccgcccacctcagcctcccaaagtgctgggattacaggcgtgagccaccgtgcccagcctaaaaaattttgtttttctgtatagttggggtctcactttgttgtccaggatggtctcaagctcctggcctcaagagatcctcctgccttggcctgccaaagtgctgggattataggcatgaggcaccatgctcagcctaaaaagtgctcttgatgggcagatataccgtcagtctttttgacctattgacctgtccctccccctgttactattccccttctcctatcctcctatgtctgtttgcagctgctccccacccccatccatctggagcctgattagcttgtgtgtgcttagcagatgttggctgaacagacgggctctttcttccttctcagacaggtctccattttcccatctctagaatgggtacagtcacatttgccctcctacaggttggaatgggtacagtcacgtttgccctcctacaggctgggaaggctctatgacatcaggccatgtaagaggggaaagcccagcccctagagtcagctttgaatggaaagggaggttaatctgctgctgccctcctacctcaattaagaccggggctaccccattgcccacgtgcggtgcgggggaaggtttttccatttgttagaggctctcacttgcttatactgagcctgtcaggtaagaaatacattctattttgtttgagacactcttgttctgagtctcagttatggaaacccaacctaatgttccccatgggcctgatgaatgttccttgttgttgaagccaatctgagttgcatttcctcttacttttagtaaaaacctctacaaagggaaattggggtcttgccccttggggtacatattagtttcctatagtgactctaacaaattactcataaattgagtgactcggaaccacagaaataataattattattattgttactattttgagatagagtcctgctcttttgcccaggctggaatgcagtggcgagatcttggctcactgcagcctccgcctcccgggttcaagcgattcttctgccgcagccacccgagtagctggcattacaggtgcccgctatcatgtccagctattctttttttttttgtaactttagtagagatgggatttcatcatgttggccaggctggtctcgaatgcctgacctcaagtgatccacctgtctgagcctcccgaagtgttgggattacaggcgtgagccaccgcgcctggccagaaatggattatatggattattttattttatttttttgagatggagtttcactcttgttgcccaggcaggagtgcaatgatgtgatctcggctcactgcaacctctacctcccgagttcaaacgattctcctgcctcagcctcctgagtagctgggattacaggtgcgcgccaccatatctggctaattttgtatttttagtagagatgggatttcaccatgttggccaagctggtcttaaactcctgacctcacgtgatccacccacctcggcctcccaaagtgttgggattacaggtgtgagccactgcacccggccagattattttatagttctggagtcaggagaccaacatcagtctcactgctgaaacccaggtgttcatgggctgggccatgcttctttaagaggctgcagcgtgagaatccattttcttgctgtttccagcctctgcagttgcattctttagcatatggctccttcttgcatcttcaaagccagcataactttagtgaccacattgccttttttttgtgtcaaatctccttctgtttcccttctacgaggacccttgtaatgccatttttttttttttttgagacggagtctcgctctgtcacccaggctggagtgcagtggtgcgatctcggctcactgcaagctccacctcctgggttcacgccattctcctccctcagcctcccgagtagctgggaccacaggcacccgccaccacacccagctaattttttgtatttttagtggagacggagtttcactgtgtaagccaggatggtctcgatctcctgacctcgtgatctgcctgtctcggcctcccaaagtgctgggattacaggcgtgagccacgatgcctggcctgtaaagccatttaaggcccacctaggtaatccaggataaaccatccatctcaagacccttaattaattaattaatatttaatgttttttaaaaaattaatttatttatttattgagacagagtctcactctgtcactcaggctggagtgcagtggcgtgatctcggctaactgcaacctccatctcccaggttcaagcgattctcctgcctcagcctcctgagtagctgggattacaggcgcctgccactgcgcctggctaatttttgtatttttagtagagactgggtttcaccatgttggccaacctggtctcgaactcctggccttaagtgatccatccacctcagcctctaaaagtgctgggattccaggcgagagccaccacaccaggccagttgtcattattccttctgtgcgtgaatccaaactggggagaaaggctctgtgtgtatgtgtgtgtgtgtgtgtgtgtgtgtttgtgtgagcacgtgtgaggtctgagggcttcctgtcaaaatgaatttgcatgtatttgactttgaaaggaaaagggaactgagagagcccccagacgcctgagtcggagagacagggggcagaggttgccaagccctggctgccacttgtcaggttccctgtgctagacatgcataatctgtattccatcactgggtacccggacccaccaggtaaggccccggccaggctggggctggggcctaggtgtggtcaggacccagggtacagaatccccaccatggggcagctgaggcagagaccagggcttgagggatggagggaggagggaatggctgggctctgacttgcctttcccctggaagggaccatggaggaggaggaggaggatgatgactatgagaactcaacacctccctacaaggaccttcctcccaagccaggtaagaggactttttggagtgtgacctgggggaatacagggaatggggtctccagtgggcattggttgggcattgtagacacatagtcagtctcctctgtatccagcccatgccgggcactgtggaacccacaccctgcccaggacgacctgtcagtctgatggcggaggtgggtttgggcacagtcttggtgagcagggtgagagaggaggggtcaggagattggcaaaatccttgggggactgagggctcaaatagaggaagggactttggggtggggcttgagggatgagtagacatatcttaagaagagaagtccaggagagaacagttaggtgcaaagtctctgagttacaaaagctggtgcttgagaaactgggagtggactgtgggctcccagtctcctcacctttctacccaaagcccaggttttatttagacttggatctcaaacccaaggcatagcacagggttcaacaagagactgataagtggttgttaaagtggaggtttgggccagctgcagtggtgtgcgtctgtagtcttgatactttgggaggtcaaggtgggaggatcgcttgaggacaggaatttgagaccagccagggcaacatagcaagaccctatctctgccaaaaaaaaaaaaaaatagaggtttgggccgtgtgtggtggcacatgtctgtagtcccagctacttgggaggctgagtcagtaggatcacttgagcccaggagttctgggcgattgtgaactaggcgatcgggcgtctgcactaagtttggcatcaatatggtgatgttttgggagcaggggaccaccaggttgcctaaggtgtctgaggaggggtttccaggttggaaacggagcagttcgacacccccaagctgatcagtagtgcgactgctcctgtgagtagccgctgcactccagcttgggcagcatagcgcgactccacttctaaaaaaatagagaaaatgaaaccggaggtttttgaggtattcctgagtttactgccaccagggaccctgaggccatgagagatcccggaggcccaaaacagaaaatccctgagatatgctgatggcctggtcctggtgaccttagacaggagccattctgtgagggctgaggctgtatatcccccatctctgagtccaaagtggggccacctgggaggtccagaaatatggtgggacttgcctgaggtaggaggtgacctgtgctgtgttgtttcactgccccatttccaatttatggtcctaatgtgaccctcaagccctgggtctacatatatgaccaaccaatcccattcccttcttcagggccacgtctgctccaaaagcacagtcctgtccccacatccacatgcagcccagcatccactctccaatccaacttcatcaccctctctactatagcccagcctcgactccttccccattcccaaacctggcaaggactctgttcttcatcctaaccacatcatgaccttacccacatccatccctgtccccaacccattttccatcccatcccaccccatcccaacaccaattctaatccaaaccccacctcatcttcatccccatcctgaaacgcaactgtttttgttttttaaaatcccctccatccccttccatcccttctcctttcaatcaaaccctcaaagagacacacagagaagagaactgtgaattgtctgctcattagtttttatgagaggaaaccagagaatttaaaaaaaatatttttgagacagggtcttgcttgtcacccaggctgccctgaagtggtgcaatcatagctcactgcagccttgagctcctgggtccaagcaatcctcctactacaccctcccgagtagctggggttacaggcatgagtcactgtctgtaaagcctcatgtgaagctcagggtctacatatatgactcatatgactctcagggcctgtaagttctgcagagatgactgtggtagtcagccttcaagatgggttccctgtgacccttacgttctcatattcgtgcccttgtgtagtctcttcccacaatgactcagagctggtccatgtgataaatagaatactgtatagtggagaccatcctttgtgacttgtgaggctagatcataggagcatggtggcttctatctttgcctctgccatgttgtgaagatgcccagtcatccctttggagaggctcacatggcaaggaactgaggcctcccaccaacagccatgtgagtgcatcatcttggaagcagatcctctagccccagtcaagcctgcagatgacttgcagtcccaggcaacatcttgactacaatcacgcaagagatctcaagctagaactacccagctaagctgctctcagattcctgaaccacagaaactgtgagataataaatgcttatggttgttttaagtcactgcgttttggggtaattggttgtgcagccatagataactgacccagtgccctggtacttcaccatggaatgtgggggaatacttaacacctatccccttaacatcttgttacaaatgttaccacttccaggaggtacttcctgatgacctctctacattagcttttatcctatcccattgctctgttttattaggtttagagcagtaatacttagtctatataaaaacatattttaatgtttcttaatttctttactttttttttttttttttcttgagacggagtttcactcttgctgcccaggccggagtgcaatggtgcaatcttggctgacagcaacctctgcctcccgggttcaagtgattctcctgactcagcctccctggcagcgggattacaggcatgtgccactgtgcccggctaattttgtatttttagaaaagatggggtttctccatgttggtcaggctggtctcgaactcccgacctcaggtgatctgcctgccttggcctcccaaagtgctgagattacaggcacgagccaccacgcccagcctcttttctacttttttaagagtggggtctccctctgttgcccaggctggagtgtagtagtgcaatcatggctcactgctgtgtcaacctcctgagctcaagcaatcctcccacctcagcctcctgatagctgggactactggtgtgcaccaccatgcctggatggttttttctaaattttttttacagagatagggtcttgctatgttgcccaggctggtcttgaactcctggcctcaagcgatcctcctgccttggcctcccaaagtgctgggattataggcatgagccattgcgcccagcctatttctatgtctctttactggtttattgtgtctctggtctagattgaaggaagaagtttatccatctcttccacccagaacttggtgctctgtaggggagctcaactgggagcggggaggtgggtggctgttgtcattgtttcttctttttctttctttctttctttttttttttttttgagacagaatctcactctgtcactcaggctggagtgcagtggcatgatctcagctcactgcaacctccacctcctgagttcaagtgattcacctgcctcagcctcacaagtagctgggattacaggcaggcaccaccacgcccggctagtttttgtatttttggtagagacggggtttcaccacgttggttgcccaggctgatctcgaactcccaaactcaggcgacctgccagcctcagcctcccaaagtgctgggattacagacgtgagccaccacccccggcccattgtttcttctatgtgtgagtccaaactccagagaaagatgtgtgtgtgtgtgtgtgtgtgtgtgtgtttgtgtttgtgtgaggtctgggggcttccccccaagatggatttgcctgtacttgactttgaaaggaaagggaaacagacagatgccttagacatctgagtaggagagacaagacctggctaccccttgtcatgttcctggtgttagcggtagccatgcacaacctgtattctatctctgggtgtccagacccaccaggtaaggccctggccaggctggggctggggcccaggtgtggtcaagatccagggtacagaatccccatcatggggcagctgaggcagagaccagggcttgagggatggagggaggagggaatggctgggctctgacttgcctttcccctggaagggaccatggaggaggaggaggaggatgatgactatgagaactcaacacctccctacaaggaccttcctcccaagccaggtaagaggactttttggagtgtgacctgggggaatacagggaacggggtctccagtgggcattggttgggcattgtagacacacagtcagtctcctctctacacagcccatgccgggcactgtggaacccacaccctgcccaggaggacctgtcagtctgatggcagaggcaggattgggcacagtcttggtgagcagggtgagagaggaggggtcaggagattggcaaaatccttgggggactgagggctcaaatagaggaagggactttggggtgagacttgagggatgagtagacatttcttaagaagagaagtccaggagagaactgttaggtgcaaagtccctgagttacaaaagctggtgcttgagaaactgggagtggactgtgggctcccaatctcctcacctttctacccaaagcccaggttttatttagacttggatcacaaacccaaggcatggtacagggtccaacaggagactgataagtggttgttaaagtggaggtttgggccagctgcagtggtgtgcatctgtagtcttgatactttgggaggccgaggtgggaggatcgcttgaggacaggagtttgagaccagccggggcaacatagcaagaccccatctctgccaaaaaaaaaaaaaaaacaagtagaggtttggaccgtttgtggtggcacatgtctgtagtcccagctacttgggaggctgagtcaggaggatcgcttgagcccaggagttctgggctattgtgaagtatgtgattgggcatctgcactaagtttggcatcaatatggtgatgttttgggagcagggaccaccaggttgcctaaggtgtctgaggaggggtttccaggttggaaacagagccactcgacacccccgagctgatcagtagtgcgactgctcctgtgagtagccgctgcactccagcttgggcagcatagcgcgaccccacttctaaaaaaatagagaaaatgaaaccggaggtttttgaggtattcctgagtttactgccaccagggaccctgaggccatgagagatcctgggggcccaaaacagaaaatccctgagatatgctgatggcctggtcctggtgaccttagacaggggccattctatgagggctgaggctgtatatcccccatctctgagtccagagtggggccacctgggaggtccagaaatatggtgggacttgcctgaggtaggaggtgacctgtgctgtgttgtttcactgccccatttccaatttatggtcctaatgtgaccctcaagccctgggtctacatatatgaccaaccaatcccattcccttcttcagggccacgtctgctccaaaagcacagtcctgtccccacatccacatgcagcccagcatccactctccaatccaacttcatcaccctctctactatagcccagcctcgactccttcccccttcccaaacctggcaaggactctgttcttcatcctaaccacatcatgaccttacccacatccatccctgtccccaacccattttccatcccatcccaccccatcccaacaccaattctaatccaaacctcacctcatcttcatccccatcctgaaacgcaactgtttttgttttttaaaatcccctccatccccttccatcccttcccctttcaatcaaaccctcaaagagacacacagagaagagaactgtgaattgtctgctcattagtttttatgagaggaaaccagagaatttaaaaaaaatatttttgagacagggtcttgcttgtcacccaggctgccctgaagtggtgcaatcatagctcactgcagccttgagctcttgggtccaagcaatcctcctactacaccctcccgagtagctggggttacaggcatgagtcactgtctgtaaagcctcacatgtgaagctcagggtctacatatatgactcatatgactctcagggcctgtaagttctgcagagatgactgtggtagtcagccttcaagatgggttccctgtgacctttacgttctcatattcgtgcccttgtgtagtctcttcccacaacgactcagagctggtccatgtgataaatagaatactgtatagtggagaccatcctttgtgacttgtgaggctagatcataggagcatggtggcttctatctttgcctctgccatgttgtgaagatgcccagtcatccctttggagaggctcacatggcaaggaactgaggcctcccaccaacagccatgtgagtgcatcatcttggaagcagatcctctagccccagtcaagcctgcagatgacttgcagtcccaggcaacatcttgactacaatcacgcaagagatctcaagctagaactacccagctaagctgctctcagattcctgaaccacagaaactgtgagataataaatgcttatggttgttttaagtcactgcgttttggggtaattggttgtgcagccatagataactgacccagtgccctggtacttcaccatggaatgtgggggaatacttaacacctatccccttaacatcttgttacaaatgttaccacttccaggaggcacttcctgatgacctcgctacattagcttttatcctatccctattgctctgttttattaggtttagagcagtaatacttagtctatataaaaacatattttaatgtttcttaatttctttacttttttttttttttttcttgagacggagtttcactcttgctgcccaggccggagtgcaatggtgcaatcttggctgacagcaacctctgcctcccgggttcaagtgattctcctgactcagtctccctggcagcgggattacaggcatgtgccaccgtgcccggctaattttgtatttttagaaaagatggggttcctccatgttgctcaggctggtctcgaactcccgacctcaggtgatctgcctgcctcagcctcccaaagtgctgagattacaggcgtgagccaccatgcccagcctcttttcttttttctttaagagtggggtctccttctgttgcccaggctggagtgtggtagtgcaatcatggctcactgctgtgtcaacctcctgagctcaagcaatcctcccacctcagtctcccgatagctgggactacaggtgtgcaccaccatgcctggatggttttttctaattttttttttttttttacagagatagggtcttgctatgttgcccaggctggtcttgaactcctggcctcaagcgatcctcctgccttggcctcccaaagtgctgggattataggcatgagccactgcgcccagcctatttctgcgtctctttactggtttattgtctctctggtctagattgcaggaagaagtttatccatctcttccacccaggacttggtgctctgtaggggagctcaactgggagaggggaggggtgtggctgttgtcatagtttcttctttttccttttcttctttttttttttttgagacagagttttgctctgtcgcccaggctggagtgcagtggcgcgatctcggctcactgcaagctccgcctcccaggttcacgccattctcctgcctcagcctcctgagtagctgggaccacaggcgcccgccaccacgcctggctaattttttgtatttttagtagagacagggtttcaccatgttagccaggatagtctcgatctcctgaccttgtgatctgactgcctcagtctcccaaagtgctgggattacaggcgtgagccaccgcgcctggcccttttttttgagacagaatctcactgtgttgcccaggctggagtgcagtggcgctatctcggctcactgcaatgggggctattgtcattgtttctccttcctctttttttttttttttgagacagaatctcactctgtcactcaggttggagtgcagtggtgcgatctcagctcactgcaacctccacctcctgagttcaagtgattcacctgcctcagcctcacaagtagctgggattacaggcttgcaccatcatgcctggctagtttttgtatttttgttagagacggggtttcgccatgttggttgcccaggctgatctcgaactcccaaactcaggcaacctgccagcctcagcctcccaaagtgctgggattacagatgtgagccaccactcccggcccattgtttcttccgtgtgtgaatccaaactccggagaaaaatgtgtgtgtgtgtgtgtgtgtgtgtgtgtgtgtgtgtttgtgtgaggtccaggggcttccccccaagatggatttgcctgtacttgactttgaaaggaaagggaaacagacagatgccttagacatctgagtaggagggacaagacctggctaccacttgtcatgttcctggtgttagctgtagccatgcacaacatgtatactatcgctgggtgtccagacccaccaggtaaggccctggccaggctggggctggggcccaggtgtggtcaagatccagggtacagaatccccatcatggggcagctgaggcagagaccagggcttgagggatggagggaggagggaatggctgggctctgacttgcctttcccctggaagggaccatggaggaggaggaggaggatgatgactatgagaactcaacacctccctacaaggaccttcctcccaagccaggtaagaggactttttggagtgtgacctgggggaatacagggaacagggtttccaggaggcattggctgggcattgtagacacacagtcagtctcctctgtatccagcccatgccaggcactgtgcaacacacaccctgcccaggaggacctgtcagtctgatggcagaggcgggtttggacacagccttggtgagcagggttgagagaggaagggtcaggagattggcaaaatccttgggggactgagagctcaattagaggaagggactttggagtgggacttgagggatgagtagacatttctttctttttttctttttttttgagatggaatttcactctgtcacccaggctggagttcagtggcacaatctccgctcactgcaacctcgcctcctgggttcaagcaattcttttgcctcagcctcccgattagctgggattgcaggcgcctgctaccatgcctggttaacttttgtatttttagtagagaccagggtttcaccatattggccaggatggtctcaaactcctggcctcaagtgatccgcctgccttggcatcccaaagtgctgggattacaggtgtgagccaccacgcctggccgagcagacatttcttaagtagagaagcacaggagagaattgttggctgcaaagtccccgagtcataaaagctggtgcttgagaaactgggagtggcctgtgggctcctcaatctcctctcattaccactcaaagcccagggctttatttaatcttgaatctcaataaacccaaggcatagcccagggttcaacaagaatctgatcagaggatataaaagtggaggtttgggctggttgcagtggtgtgtgtctgtagtcccactgctttgggaggccaagatgggaggatcacttagccatgagttcactggaggccaggagttcgagaccagcttgggcaatatatagcaagacgcccatctctaccaaaaaaaaaaaaaaaaaaaaagggaagtttgggccaggcgtggtggctcatgcttgtaattctagcactttgggaagccaaggtgggagcatcactggagccccagaaaagagaccatcctgggtaacacagtgaaacccccagctatatgaaaacattttttttttcaaattaaaaaaattagccagttgtgggatgtgtgcctgttgtcccagcttctcaggaggccgaggtggtaggattgctagaacccgggagttcaagggtgcagtgagctatgatggcaccactgcactccagtctggatgacagagcaaggcactgtctttaaaaaaatagaacacgggctgggtgcggtggctcacgcctgtaatcccagcactttgggaggctgaggcgggtggatcacgaggtcaggagattgagaccatcctagctaacacggtgaaaccccgtctctattaaaaaaatacaaaaaattagctgggtgtggtggtgggcacctgtagtcccagctacttgggagactgaggcaggagaatggcgtgaacctgggaggcggaggttgcagtgagccaagatcgcgccactgaactccagcctgggagacagagagagactctgtctcataaaacaaacaaacaaacaaacaaacaaacaaaaacatggccgggcacggtggctcagccctgtaatcccagcactttgggaggccaaggcgggtggatcacttgaggtcaggagttcgagaccagcctggccaacatggtggaatcctgtctctactaaaaatataaaagttagctgggcgtggtagcatacgcctgtaatcccagctgagggggctgaggcagaattgcttgaacccagggggcggaggtttcagtgagatgagatcacgccactgcactccagtctgagcaacagagcaagactctgtctcaaaaaatataaaataaaataaaaaataaaataaaatagggagatacccaggcaatctaggttcgttggtcaccctacttaatcccatctccatccctaatcccaattgcattcttacgtccaaccccgtctgtaacctaatctccaatcctccactgcaatcctaaccctgtttccatcacttcctcttggcgcattcccatcctcagcccagccctcaccctgagcttctcttctccaggttcaagtgctccaccaagacctccaagggcaggtgagttggggctgggggtgtaggagacccagagctggctttgccctgctctggccctgaccaaccattcctccctcctcagcaaaggaaacagagaaacccccacttccttgcaagccccggaacatgacaggtgagagctgacagttggagtcttcctgctcacctggctgaagcccttcttgaaatgactttctcatctcttctaggcctggacctcgccgctgtcacctgtccacctcctcaactgggtgagcagtgggaagaccctttaagatgcctaagaggggatacctggatgtttcctttcaatcccccaatttttatttatttattttttttgagacagagtctcactgtcatccaggctggagtgcagtggtgcgatactggctcactgcaacctctgcctcctgggttcaagtgattctcctgcttcagcctcctgagtagctgggactacaggcacgaaccaccacacctggctaagttttgtatttttaatagagatggggttttgccatgttggccaggctggtctcaaactcctgacctcaggtgatccacccgcctcagcctccgacagtgctggaattacaggcgtgagccactgcccacagccagccccctaaattctgaccagagaacaaaacagaggttgttgatcttggaagacagagtctttggcatcttctgaataaacctctctccccctttctcccagctgtgaatcttgagccttctccattgcagccatccctggccggtaagtgtcctcccatttcccctctgacagtggctagtgtatctgattgagacctatggctctacagtgagaccctgagtcagaggaacttctcctttaagaagctgctccttcaggacctgctgcactgttctgagttagtctagtgagcgctgctctaagtgagaaagccattccttgacatcagagtttgcaaacgtgtattcttttttgtccttctgaggaccagagttatgtggttgttttgtttttgataatgatgatgtacttatggttctgttggtgattgtgatggaaggatgaggaaggagatgatggaaaggaagaggatggttggtggtagtaacgatggtagaggtagtgatggcgttgttgtgtgctgatggtgatggtggagatactgatgatggtggtgatggtggagatagtgatggtgttgttggtattgatgatggtaatgatggtggaaacagtgatatggtggtaatgcagggcggaggtagtgatggtattgttggtgatggtggtggtggtgatgatgaaggtagtgatggtgttagtgagatggtgatgatgatagtggtggtagtgatggtgttggtggtgatggtgttggtgatgatagtagaggcagtgatggtattgttgacaatgacaatgttgttggtagagatgatggtggtgatggtggaggtagtgatggtgttggtgatgaccatgtttaaaaagaaaaagaagcttctcctctctgagtctaggccagatctccagaaactcaggtatctgcttgcataagatatgggaaatgttctctgctctagaagccggggtccacaagcttccttgacctaggagcaacttggtcaggggtttctggagagtagaagatgatgcatcatagatattaagaacaaagctgtgtccaagtcatgcctaacctcaccaagcctcagtttactcacttgcaaaatgggaataatgcttataacctacatcataaggatgagactccaataagataggaaggatgtaggttgggtacagtggcttacgcctgtaatcccagcactttgggaggctgaagcagggaggatctcttgatgccaggagttcaagaccatcctggacaacatggcgagacccccatctctgcaaaaaaataaaataaattagctgggcctagtggcacacatctatagacccagctacttgaaagggtgaggtgggaggattgcttgagcccaggcattagaggttgcagtgagctataactgtgccactgccctccagcctggatgacagagtgaaaccttgtttcaagaaggaaagaaggaaaaagagaaggatgcaacatgatgcttagcgcaccgtaaatgcatcaaaaagaccctgagcctccccagggttcactctccctaaccctctcttgctgacttcatctgctgaaacagtcatgactacagacttctgccccctgctcttggacaaagacttaagagtctcttccttactctctgaagccccagtatcagtctctctgttcccatccccactccccagcaactccagtcccctggctcaatcagaggtctggaggtcctggctgctgccagaagaggtggatggtgtacctgtgtctgctggtggtgacttccctgttcctgggctgccttggtctcactgtgaccctgattaagtgtgagtagggccaggaagggacatggggagagattggggagggtgcacaggaggacctgggctcaatttggactcttcttcatagaccaggagttgatggaagaactgagaatgttaagctttcagcagatgacgtggcgaacaaatagtgagtgctttcagtcattccttcatgccactcctattgagccctaacccaatcctcagatccaactccaagatccaacctcatccccatctttgctgggcactgtgctaggtaccagggggttaaaatggtaaacatgtcagacacagtctttgtctgactgtgtgaagtgtgcatgtgtatatgtgtccagacctccaccatccaatatggtggccacaagccatatgtggctgttgaacacttgaaatgtggccagtccaaactgagatgagcactaagtatgaaatacacactggtccaggtgcagtggcacatgcctgtaatcccagcacttttggaggctgaggcaggattgcttgaggccagaagttcgagacccgactgggcaacacagcaaggctccatctctaaaaaaaattagccgggtgtggtggtgtgtggtgtgtgcttgtcatcccaactactcaagaggccgaagtgggaggatctcctgaatcagggagtttgaggttgatcatgagccatgatcacactcaagagatcctcctgcctcagcctcttgagtagctgggacataggcgcatgccatcacacccggctggttaaaaaattttttttttgtatagaagaggtctcactatgttgactaagctcgtttcaaactcctggcctcaggtattcctcctgccgcagcctcctgaagtgtttcgtgcctggcctaaaacctgtgtttctgttttgtccaactgaagggccagctactgagctagcgagtgttgaaaaagggaagagttcgtgggggagtagtgataatacacacgttaattatagaagaatcttttgacctgggttggccttcatcatgactgccaaagtctgaatatttctccattccacactgcctcaccctatgcttcataacaagcaagctcaaaacccatcaatggcttctcattgtccagagtccaaggtgaaacctttagcttggcattcaaggatccacatattaggctgggcacagtggctcatgtctgtaatcctagcactttgggtggccaaggtgggaggatcccttgaggccaggagttcaagaccagcctgggcacagcaagactttctttcgtttgtttgttctttctttctctctctctctctctctctcactatctctttctttctttctttctttttctttttccttcctttcttccttccttccttcccttcccttctccttccttccttccttcctttcttctctccctctttctccttccttccttctttccttccttcttactttctttctctcttgctttctttcttttgacagaattttgctcttgttgcccaggccggagtacagtggcgcgatctcagctcactgcaacctccccctcccaggttcaagtgattgtcctgcctcagcctcctgaatagctcagattacaggcatctgccaccactcccggctaattttttgtatttttagtagagatggggtttcaccctgttggccaggctggtctcgaactcctgacctcaggtgacccatctgcgtcagcctcccaaagttctgggattatgggcatgagccactgcgcccggcctagcaagaccttgtttctacaacaaattttaaaaaaatagccagtcatgatgtcatgtacctgtagtcccagctactcaggaggctgaggtgggaggatcacttgagcccaggaggttgaagctgcagtgaaccacgattgcactccagcctgtgggacagagcaggactgtgtctaaaaaaaataaaataaaggatccaggcatctgagctcattctgctttgatctcaagcttttctgagttttccctccactcttataggctttgccgcctcaccacaacatacttgcctctgtatctttgcttttttttttttttttttttttttttgagatgaagtctcactctcttgcccaggctggagcacagtggtgtgatcttggctcactgcaacctctgccttccgggttcaagtgattctcctgcctcagcctcctgagtagctgggattacaggcatgtaccaccacgcccaactaatttttgtatttttagtagagacagggttttaccatgttggccaggctggtcttgaactcttgacctcagatgatccgcccacctcggcctcccaaagtgctgggattacaggtgtgagccaccatgggcagcctgcatctttgcttttaagatagtccctgcctaatgtgcctcttcctcacctcacagttatcgaatcactttcttcctttaaaacccacttctttcagggtgcccaccacccctacttttccccacatccccgggattgatccctcctctgagccattctcggattctgagcactgtacatgtggtttttgagcgcaagcgtgacccactggaatgtggacacagtggggaacacaacccttgcttctctctctgatgtgtctgcagtccgtggtggatgggtaggatgggttctcagtctgtagccctcaagcccatcccttctgacagtgactggcatggcagggctagctggcctgaagcatgacattgcccgtgtaagagctgacaccaaccagtccctggtggaactttggggcttattaggtaagtgagacttggggaattgcccagggatggggggcatggcagagctggcacattacatcactccattgaagtcattctcagtgcagtctatgtgaatggtgcccctccccctcaccggagttgagcagtgtacagcctgcacaactgtacatggcatactatgtacatggctcaggttctggggccatcctgacagcattctgtctggttcccagactgccgccgaattacctgtcctgaaggctggctgccctttgagggcaagtgttactacttctccccaagcaccaagtcatgggatgaggcccggatgttctgccaggagaattactctcacttggtcatcatcaatagctttgctgagcacgtgagttcttcccactgaacctttgagaaccttcagggacagcctgcttctcttccaggatgcacacatccctcccttccctggatggcaagaaattagaattacttttcagttactaaaactttaacagcaagctcttcctaaggtagtatcatgcagaggttaagaagacatgctttgtttttgagttcaaattctggttgtgttgatttaacctctgtacatttcaagtatcggttttatctctaacatgaaaatacaataattaatatctgttaggtagcactttttatgtttcaggttgcattccaaatactttacatcttacagtcattaacacatgcaatcctcacgacaacctatacattagtatgccagtcggaagagtttatttcttttcttttcttttttttttttgagatggagtctcgctctttcacccaggctggagtgcagtggctggatcttggctcactgtaagctccgcctcccgggttcacgccattctcctgcctcagcctcctgagtagctgggactacaggtgcccaccaccacgcccggctaattttgtttttgtatttttagtagagacagggtttcactgtgttagccaggatggatggtcttgatctcctgacctcgtgatctgcccgcctcggcctcccaaagtgctgggattacaggcgtgagccaccacgctcggccttctttttttttttttttttttttttttttttgagatggagtctcactctgtcacccaggctggagtgcagtggtgcaatcttggctcactgcaacctctgcctcccgggttcaagcaattctagtgcctcagtctcccgagtagctgggattgcaggcatgtgccaccacgcctggctaacttttgtattattagtagagatgaggtttctccatgttggccaggctgttctcgaactcctgacttcaggtgatcctcccacctctgcctcccaaagtgcggggattataggtgtgagccaccacgctgggctaggaggggttactttatgctgcggtaacagacagtctccatagtccaatggtgaaagtagacgagggaaatcatacattgactgtcagagtttccatttacttttgctcacaaaagtcacatgtacacgcctatcttttaaggtggtagggaaataagtctcacctccgtgcaaccagaaggaggattggaatatgggtaaatagctttaatgatttgctactacaatttaggtagtattactatttgtacacaatatgtatcatctgtacttcacaggtgaggaagtcaaggttccagtacatgtaagcaacttgcctggagtcacttacagctagtgggatttaagcctaggtagccggctttcaagtccatggtcttgaccatagacataggactatagtatggtttatgtttccttttttctgtttttcagggacaaggtctcactctgtcactcaagctggagtgcagtggtataatcatagctcgttgcagcctcaaagtcctaggctcaagcaattctttcgcctcaccctcctgagtagctaggacaaccaggcacttgccactgtacccagcaaattattattattattattactttttgagatggagtctcgctctgtcacccaggctggagtgcagtggcgcgatctcggctcactgcaagctctgactcccgggttcacgccattttcccacttcagcctcccgagtagctgggactacaggcgcccgccaccacacccagctaattttttgtatttttagtagagacggggtttcactgtgttagccaggatggtctcgatctcctgacctggtgatctgcctgcctcggcctcccaaagtgctgggattacaggcatgagccaccgcgcctggcccagcaaattatttttacttttgtagagacagggtcttgctatgttgcctaggctctatgttttctattcattttatttttaatttatttatgtcattatatttaaaatgttttttttttcccagacagtatatagttgggtttggatttttaaaatctgatctgataatctctggcttttaattggtgttttcatttacttatttatgtatttttggagacagggtctcactttgtcacccaggctggagtgcagtggcgcagcctcagctcatggcagccttggcctcctgggctcaagtgattatcccacctcagctccccaccaagtagctgggacaacaggtgtgtgccaccatgcctggataatttttaacattttttgtagagatgaggttttgctatgttgcccaggctggtctggaactcctgacctcaagtgatctgccgccttcacctcccaaagtgctgggattacaggcatgagccactgtacccagcctaattggtatttttagaccgtttacatttaatataattactgattgggttggatttaggtctatcatcttattattttcctgtatgtcgtgtcccttctgttttttatccctctgtttcatagcattatttgtatgagtagttaaacagttttttttttttgagatggagtcttgctgtgttgcccaggctggagtgcagcagcatgatcttggctcactgcaacctctgcctcccgagttcaagtgattctcccgcctcaacctcccgagtagctgggattacaggcgcccaccaccatgcctggctaattttgtacttttggtagagatggggtttctccatgttggccagattggtctcgaactcctgacctcaggtgatccacctgccttggcctcccaaagtactgggattacaggcataagccaccgtggctggccaaaacagggcttttgaaggagttaaattaggtaatgtaaatgaggcaggtgcaaatcatattccctaactcagtttcacaagaaatacaactacatttcctttaaattactcattttagtttctctcttgagttctcattctgctagaatggtgtacatttactctcagtcaattgggttctcccattttacttctaaatggggacagcttttgtggggtcaaggtggaagggagcacacatcgggtctttgctgtctttactccaaactggtatctactgggacatctacagactgaatgatcctgggaaggttacttaacccctctgtgcctcagttttctcatctacaaaatgggcataatgataatacttgcttcagtgagtcatgataaggatccaatgagacaatctgtgcaaagtagtatagctcactttttttttgagatgggatcttgctctgttgcccaggctggagtgcagtggcatgatcttggctcactgcagcctccatctcccaggttcaggcaatcctcctgatttagcctcccaagtaactgggactatagtcacgtgccaccactcccagctaagttttgtatttttttttttagtagagttagggtatcatcatgttggccaggctgctctctagctaatgatctcaagtgatctgctccccttgacctcccgaagtgccgggattacaggagtgagccaccgtgccctaacccatagctcacttcttaattcattaattcaaccaacatttcctgagcacctactatgtgctggagactattctacatattggggatccagtgatgaccaagacatatgagttccctcttcttaaactgctctgattttggtgcctagaaatagcaaggactctctaaatgttaaagagtcttctggttttctggggctcagactttgggccatctaggctgcccctgaggcatcccactcttccatcagcaaagccttttgggcctggaggtcttttcctgctgttcttgggcacaagagatctttctgctcctcctatcccattctggggtctaagacactgtgaggccttctaagcctccatctagtctgatgggacaggaagacctttccgctctctgattttctgacacctccctggggctttacccaggaaatagtccccaggtcccttctgctttttagagtctccaaacccatctggggtttttaccatcacctgaaaagctcaccggaaatgagataccagattcttctctctggggcctgccatgtctacacatttattatttccttcccatggtgactttacctccccacatttttttttccatcaaagcagaaattttattacccacattctttgaccacaatgctataacgacagaaatattttcttttacaaaaatttcaatcaccttaagaatgtttaaagtcggccggctgcagtggctcgactgtaatcccagcactttgcgaggccgaggtgggcagatcacctgaggtcaggagtttgagaccagcctggccaacatggtgaaaccctgtttctactaaaaatacaaaaatgagctgggcatggtggcgcgtggctgtaatcccagctactcaggaggctgaggcaggaaaatcgcttgaacctgcgaggcggagggtgcagtgagctgggatcacaccactgcattccagtctgggagacaaagcaagactctgactcaaaaaaaaaattttttttttaaagtcaccagataactttggattaaagaagaaatcaaaactgcaaataaataaaagcaaacatcaattggcattgcctatagtagaacacatgaaatagattatagtaaaaaattcttaaaacacaaagaattccaggatgtggaaagctggggcgagtgttactcacacccaaacagcaacaatagccagaataactacaaaatcataactttttctaaactcattagctaactgagatcacctggcagtcaaaaagtctaaaatgggctgggcatggtggctcacgcctgtaatcccagcactttgacctccccacatttttttttttgagacgggatttcgctttttgttgcccaggctggagtgcactgtcgcgatctcagctcactgcaacctccacctcctggtttcaagcaattctcctctctcagcctcccgagtagctgggaatacaggcatgacaccacgcctggctaatttttgtatttttagtagagatggggttttgccacgttggccaagctggtctcgaactcctgacctcaggtgatccacctgtgttggcctcccaaagtgctgggattacaggcatgagccaccgcgcccggccacctccccacattttaaggaatcttggtttggtggtaagttgggtgagttagatgtgatttgcatatagtaaaatgcacagatctttgatgtatgttcagtgaactttgacaaatgcgtacacctgtgtaactgtcaaactaaccaatatttataatctttccaccaccctagaaagttttttcatatcctttttctagttaatccctccctgccccctacttgcaaccaccagtctaatttctttcaccatcaatttgtttggagaggagttgcttctaactatattttcttccctatcttttatctctgtcataagtcctttcttttcttccaaagacctgggattttgacttttttccgggacagaggcttgctctgctgcccaggctggagtgcagtggtgcattcatagctcactgcagccttgaactcctgggcttaagggatcctcccacctcagcctcctgagtagctgggactatagacacgcaccaccacgtctggctaatttttaaaaatttttgtagatatggggtctcagtatgttgcccagactaatctcgaactcctagtctcaagcgatcctccctccttggctaaagtggtgggattacagatatgaggcagcgtgtcaaaagcctgggcttttgaaataccaaagctaggaaacctacttttcatcttccttccttcttttcctggaacaatgaattcttatgttgtttggatgcagattaaggctaccgagtagcacaaaagtgcaagagaaaccaaaaaaaatcagttactattgctaaaaatgtcacttaaatgttataatgctacctactaagacgtccacagtatgaggctctgcacagtggctcatgcctgtaatcctagatctttgggagacttacagtgacctttgggacatgcagtgagccatgatcacaccactgcactccagtctggttgacagagtgagaccctgtctcaaaaaaaaaaaaaaaaaaattaggctggatgtggtagctcatgcctgtaattccagcactttgggaggctgaggcaggtgaatcaactgaggtcagaagtttgagatcaggctggtcaacatggcgaaagcccgtttctactaaaaaatacaaaaattagccgggcgtggtggcgggtagctataatcccagctactcgggaggttgaggcgggagaatcgcttgaacccaggaggtggaagctgcagtgagctgagatcgcaccacagcactccagcctgggtgacagagcgagactccctctcaaaaaaaaaaaaaaaaaagttaatcctcacaacactaccaggaggtagctactgtgaacccattttacaggtgaggaaactgaggcacggagcagttcgcagattgcatgagaaaaagtagcacgattattcccaccacacatgctacagtgggaggaagacattgatcctgttctgcataccatggggacggggacgggttgtgggaggtgacgttcccaagccctaaatatgtaggacagggcacagggcaggtcctcaccctgagggtcatgtagaggaatggctggctgaatggaatttttatttgcagaattttgtggccaaggcccatggctctccacgggtgtactggctggggctgaatgacagggcccaggaaggggactggaggtggctggatgggtctcctgtgacattaaggcaagtgcttgggtttcctggggtctctctgcttcctctgtgggccctgaccatggggaggggagaaggtgatggagtacatggttgaaggagtcaggagctgtttctttttttttttttgagacagagtcttgctctgtcgcccaggctggagtgcagtggcgcaatctcagctcactgcaagctccgcctcccaggttcaaggtattctctgcctcagcctcccgagtggctgggactacaggtgcccatcaccatgcccggctaattttttgtatttttagtagagacggggtttcaccgtgttagccaggatggtcttgatctcctgacctcgtgatctgcccgccttggcctcccaaagtgctgggattacaggcgtgagccaccgcgcccggccaggagctggtttttactggtacagctctacttgttttattttattttattatttatttatttatttatttatttatttatttatttattctttgagacggagtctcgctgtcgctcaggctggagtgcaatggtgcgatctcagctcactgtaatctctgtctcccaggtagaggttgattcttccaccttagtctcccaagtagctgggattacagacacccgccgtcgtgcctggctaatttttgtaattttgtagagatggggtttcaccatgttggccaggctggtcttgaactcctgacctcaggtgatctgcccaccttggcctcccaaagtgttgggattacaggggtgagccactgcgcccaaccttattttagttttttgagacagtctcgccctgtcacccaggctggagtgcagtggtgcaatctcggctcactgcagcctcaacctcccaggctctggtaatcctcctgcctcagcctcccgagtacctgggaccacagtcacacaccaccatgcctggctaattttttgtatttttagtagagatggggttttagtgtgttgcccaggctggttttgaacttctgagctcaagcgatccacccgccttagcctcccaaagtgctgggatgacaggcttgagccaccacacctggcctctactaattttaaacacagaaaaattcctgtcctgtttggtaaattgccattgccttaaatctcctgagaatccttctgctgccccttggacttccacatcacctaacaactaaaggatttgtcattggcaaagaaggggcctagagaccctgattgcagggtgtgtggcacaggtagcattgctcattattttggtacaccacccccagtcattcccatttccctgtgtgcttggcatccttgcagtccaagctgatagggtgtctagcatcccaggcttggccagacagggacagcaccagggtgattttttggtgacaggctgtctggaccctgaaccttcaatatttcctccattgcaacatctcagtcttttcgtaaaactgctgaaatatatcaagctctccaggctaatggttgggagaaaaaagggagggtggaaggatgaggaagaatttttttttttttttttttttttgagacagagtctcactctgttgcccaggctgaagtgcagtggtgcagtcttgacccaatgcaacctctgcctcccaggctcaagtgattctcccacctcagactattgagtagctgggattacaggtgcgcaccaccatgcctggctaatttttttttttttttttgagacggagtctcactctgtggcccgagctgtagtgcagtggcacaatcttggctcactgcaacttctgcctcctggattcaagcgattctcctgccttagtctcccaagtagctgggattacaggcgcccgccaccatgcttggttaatttttgtagttttagtagagacggggtttcaacatgttggccaggctggtctcgaaatcctgacctcaggtgatctacccgtcttggcctcccaaagtgctgggattacaggtgtgtgccaccgcacctggcggaacattggctgctaaaggctcacaggaatgctttttccgcaaagctattctcagctgaatgggagcctgctcacctaagacactacccaactccactggggtcagctcacaaccggtgacagcctaagagaagcctggaccccttgtgacaagttgggatgactctggtgctgttgacatcccagtggtctctgttggggtcaggctgaggctagagtcatctgagtccatgctcctgctcaattccttccccttctccatctagcttccctcacctctctcctaagaacatcctttaataaatcctacacactcgagtccctgaatcaggccctgctttaagcaagagcccacatgatctaaacaattcctagaaggttgggttgggaggttgtaaaagaaagagtccttggaagacaagacagaaactgaccagattcagaaattgattaaggggccaggcacggtggctcgtgcctgtaatcctagcactttgggaggctgaggcgggcggatcacttgaggtcaggagttcaagaccagcctggccaacatggtgaaaccccgtctctactaaaaatataaaaactagccgggtgtggtggtggacacctgtaatcccagctacttgggaggctgaggcaggagaattgcttgaacccaggagacagaggttgcagtgagccgagatcacgccactgcactccagcctcagcgacagagtgagactctgtctccaaaacaaaacaaaacaaaacaaaaaaccccccaaaaccagaaattgattaagggccaggcacggtggctcactgtgcccggcttacaggtgtaaggctccacacacggcctaatatgggttttgccaaatgcgtagtgccaggtattcatcattacagtattatacagaagagtttcaccaccctaaagatccctgtccctctgcccactttttcctccatccagcttctgggagccagaggaacccaataacatccacgatgaggactgtgctaccatgaacaaaggtggcacctggaatgatctctcttgctacaaaactacgtattggatttgtgagcggaaatgttcctgttgaagcccagggccgaggctgggggtccatatctgagtgtctctttgagatgagaatctcctgccctttcgtggacggccttgcctcttcgtgagtggacacacagatgtgcctcaaacaggattggcaccctggatgcagcaagttcccaggggtgcaagtcaggctgtttctagagtgaggacttgggcttgccctagtagatggtgagctgggaggatgctcagagcttggtggtgggaggtctcccacttctggggttgaaaggatcttcactaagttcctgatcatgactcttgggaagtgatactagccctgaggaccctggggctggtgttgaacctgggatgaaatatcctggcgcctgtgaaccacaaagagctgggactgggctccttttcctgcagcctcaaacttctgggctcaggtgatcctcccatctcagcctcctgagtagctgggactacacatgcgcaccaccatgcctggccaattttttgtagcatttaaagagagggagtctcactatgttgcccaggccagtctcaaactccttgcctcaatggatcctcctacttgggcttcccaaattgtgaggattacaggtgtgagccactgtgcctggctcaaaattattattattatttttatagagatgaggtctcactctgttgccgaggctggtctcaaactcctggggtcaagcaatccttccgtgatggcctcccaaagtgctgggattacaggcatgtgtcaccgtacctggccgatatttttatttttatttttactttccccatcttttccttttttttttttttccaaacaaaagctttgaaagtggtgacagaaaaatttccctttgagctagacctctagatctgcctcgcacagaaatacattaagtgggctggtctcatgtagtccccacatcattgcaaattacaaacctaaaaatacagaacatcagcggagaagacaggagagcttctatattcaccccatgtcgtcctctccagacactgcttccttcctggtctcaaacagcacaaataacccagaaaccatcaaaattatttttgaccagcaactttctcaatgtcttgggtgaggtttgcacaagctaagtggcagaatcagacttttgccagaagacttggcccgtggaacttctatccttttttttttttttttttttttttgagatagggtttcattctactacccaggctggagtgcagtggcacaatcatagcttactgcaccctctgcctcctgggctcgagtgatcctcctgcctcagcctcccaagtagctgggactacaggcgttcaccctcacacctggctggcccatggaacttctagaaaggcataccagctgaaaagcaagacccctacatagtgtggccaggcaggccataacctggtcatatccacacaggacaacgatggacctatctgccagcacgtgcccttgagctatctgtgggttgtaacgtctttgatgatataattcactttacttgccaggcacagtggctcacgcctgtaatcccagcactctgggagactgaggtgggctgatcacctggggtcaggatttcgagaccagcctggccaacatggtaaaatcctatctctactaaaaatacaaaaaaattagctgggcgtggtggcatgtgcctgtaatcccagctactcaggagactaaggcacgagaattgcttgaacccaggaggcggaggttgcagtgagccgagattgtgccactgcactccagcctgggtgacagagcaagactccatctcaaataaataaataaaaataaaaattcactttacttctgtgtggactttcctgggctattagctcttgcaatgttagtgcttctcaaaatgccactatgttgggtgttccttgtctactgtgtgttagtttgctggggctgccataacaaaggactgggtggcttcagcaacagaatgcattttctcacagttccggaggctggatgtccaagatcaaggtgttggcagggttaatttcttctgaggcctcctgtcttggcttgtagatgatcctcttctccctgtgtcttcacctggttctccttctgtgtgtctgggtcctaatctcctcctcctcttcttttgtttttgagacagggtctcgctctgtcactcaggctggagtgcagtggtgtgatctcagctcactgcaacttccacctcccaggcttaagcatcctcccgcctcagcctcctgagtagctgggattacaggtgtgcaccaccgtgcctggttaattcttgtattttttgtagcaacggggtttcaccatgttgcccagactggttttgaactcctaggctcaagcaatctgcccaccttggtcccccaaagtgctgggattacaggcatgagccactgtgctgggcctacaacgaccactttaaagatcctgtctccaaatacagccatattaggaggtcctgggaattagaatttaaacatatgcatttgggaggggtggcacaatttggcccataacattcacaaactgccagagtgacccccacccgaccctcctgccctggccatgtgacaaccaaaaaataccaattagagggctggtactactcccagctaggcataactcaacatagtattccctttggacaatccctgaattgcatccaagggtgggtagacattctccaaaccaatcaatttattttttttttttttgtgacagagtcttgctctgttgcccaggctggagtgcagcggcgtgatctcggctcactgcaacctctgctttccaggtttaactggttcttctgcctcagcctcctgaatagctgggatttcaggcacgtgccaccatgcctggctaatttttgtatttttagtagagacagggctttgccatgttggccaggctggtctcgaactcctgacctcaagtgatccgcccacctcagccccctaaagtgctaagattacaggcgtgagccaccatgcctggccttattttattttttgagacaaggtctcactctgtcgcccaggctggagtgcagtgttgtaatcatagctcactgaagcctcaaacacctgagctcaagaaatcctccgtcctcagactcctgtataactagaactacaggtgtgcccccaccacacccagctaattttaatttttttttttttttgtatagacaggggtcttgctttgttgcccagactgggcttaaactcctggtctcaaacaatcctcctgcttcagcctcctaaaatacaaggattgcgatcaatttattgatcaataagctcccttaatcaatagcagaatctttcctgttttgtctgagaacaggtgcttatagcaaggagactgtgaggagagcaggtggtgggagaggtcggagctgatttcacttcctgtttctttgatttgttttaaatctacttgttcttttatttcgttattaaaaaaattttttttgagatggagtgtcactctgtcacccaggctggagtacagtggcatgatctcggctcactgcaacctcctcctcctgggtacaagcgattcttgtgcctcagcctcctgagtagctgggattacaggtgtgcgccaccacatccggctaatttttgtattattagtagagacggcatttcgccactttggccaggctggtctcgaactcctgacctcaagtgatccacccgccttggcctctcaaagtgctgggattacaggtgtgagccactgcacccagcctcgttatttatttttaagagatgggttctcaggacgtggcccaggctggagtgcagtggcatttcacaggcacgaccccactactgagttttggttctgtctgtcctctcttctcacctctgcccacctctgcagctgccctgatgcatcactaccaaagccagctcctgtactgtccgcagcctgctgagtgggtgggtgtcgtgttgtaaaccctccacccaggggactgttatgtcaagcaactttatctggggtcaggggaagttcccacatttcagaagagggaagttgttttctgatatgcgtattgagaaatggggaagcaggggtctgtggtcacgtctctaggaggcccctggtggaactggtcccaacctatctcccttccacatctctcatgattatctaattgcagagaggtaaatatgaaagaggtcactttttaccactttaggtccaggggagcaacagttggataaaaataataaccatggtttatcaaacatatattgtgtggtaaataaatgcagtggctctcattgaatcttcaccatgactttgtgaggttggaatatttaccaacgcccgccaatctttttttttttttgggcagagtctcactctgtctcccaggctggagtgcagtggtgtgatctcggctcactgcaacctttgcctcctgggttcaagccattcttctgcctctgcctcccaagtagttgggattacaggtacaccgtaatgcccagtgaattttttcgtatttttactagagatggggttttgccatgttggccaggctggtctcaaacccctggcttcaagtgatctgcctgccttagcctcccaacgtgctgcgtgctgggattataggtgtgagccactgtgcccggcccccatttttttttttttttaaagacagggtctcactctgtcacccaggctgaagtgcagtggtgcaatcacagctcattgtggcctcaacctcctgggctcaagtgatcctcccacctcagcctcccaagtagctgtggctataggtgtgtgccactacacctggctaaccaaccccattttatacctgggcaaactgaggcccagaggtggggtctcacggcttgtccattgtcatttagtgggtaaatggcagaactgggattcagattccatctgtgcctcccactgtttgttgatctctttctacagctgccttctttttttttttttttttttttttgagatggagtctcactctgttgcccaggctggagtgcagtggtgtgatcttggctcactgcaacttccatctcccaccccagctccctcgttcctcgggagaggtgactctgagatgcatgttccacattatctcctgaaagtccccactagggtaaagctccacctgcctagagagatagcctgctcaactaacacatttttggttaatttttaaaattaaaaaaaattttttttagagagacagcatctctggccaggtgtggtggctcacgcctgtaatcccagcactttgggaggccgaggcaggtggatcgcttgaggccatgagttcgagaccagcctgggcaacatgttgaaaccccatctctactaaaaaatacaaaaattagccgggcgtggtggtgcgtgcctgtaatcccagctactcaggaggctgaggcaggagatttgcttgaacccgggaggcgaaagttacagtgagctgagattatgccactgcactccagcctgggcaacagagagactctgctaaaaaaaaaaaaaaattagagagacaggttctcgctgtgttgcccaacctagagtgcagtggtgcaatcatagctcactgcaacattgaactcctgggttcaagcaatcctcccgccttcgcctccagagtatctgagactacaggtgtgtgccactgctcccagcaataacacatcttttaacacatcttgttctttctctgccttacttttttttttttttttaacagagtcttgctctgtcgcccactgtaacctccgcctcccaggttcaagtgattcttctgcctcagcctcccgagtagctgggactacaggcctatgccaccacacccggctaatttttgtatttttagtagagacggggtgtcaccatattggccaggctggtcttgaactcctgacctctgcccttgtgatctcctcgtgatctccacgtgaactcctcgtgatctgcccatctcggccttccaaagtgctaggattacaggtgtgagccaccgtgcccagccctgcctcatttcttcacaccccgttggtgtttcctgggatcatctccaaaataatctacctgcatgcattaaactccttatctcagagtttgcttttgggagaactcaaatgatgatgctatgggatgagtgtcatcatcaaagatgagtttgtgaaatggttctggtttgcctgggactgagggactcctggattgtgggacttttggtactaaacctgggaaagtcccgggtaaaccagaatgaattgactatccttataggaggatagtgtggcatcagggaagccaagagaagagaatgcttcaagaagaaaaaaaatgatcaacagagtcaaatgttgacccagcggtcaagtttggtaagactgagaaacaaccagtggactttgcaccgaggaagcatttgggacattggttcatcctttggtgtgttgcaagcagaagttagattgcagtggttgaacagtgaggaggttggagcaagtgaagacaacacagtggaaacaagcttttttctagaatttttttttttttttttttgagatggaatttcgctcttgttgcccagtctggagtgcagtggcgcaatctcggctcaccgcaacctccatctcccgggttcaagtgattctcctgcctcagcctcctgagtagctggggattacagacatgcgccaccacgcctggctaatttcgtatttttagtagagagggtgtttctccatgttggtcaggctggtctcgaactcctgacctcaggtgaaccacccgccttggcctcccaaagtgctgggattataggtgtgagccaccacaccccacctttttttctagaattttggctgtgaagaggaggagagatagagtggctattgcagagggaaagcagattaaggggagactttttggatagaaggggcctgaacatgtgtcctctcttttccttccttcttttcttttctcttttcttttcttttttctttcttccttccttcctttctttttcgttctttctctttctctctctcttcctctctctcttccccttgcttccctccctccctccctccctttctttctttctttctttctttctttctttcttcctttctttctttctttctttcttttctttctctctttcttgatggagtcttactctgtcacccaaactagagtgcaatggcatgatattgactcactgcaacctctgcctcctgggttcaagtgattctcctgcctcagcctcccaagtagctgggattacaggcccctgccaccacgcctggctaatatttgcatttttagtagagatggggtttcaccacattggataggctggtctcgaactcctgacctcaggtgatccacctgcctcggcctcccaaaatgctaggattacaggcgtgagccactgcacccggccatgtcctctcttttcttccaaaattcctattattctcatattaaacaccccagtcttccttttattcttccaagattttaatcttttggccttttttcctcagtgctttgagctatttctcctgtgtggtcttctaagcctcaaatttggcttttgagagtgatgacttaaaaaaaaaatcacccagcatcaatagcagacaggtgctaaagaaaaataaaaatcatccagtaaaatatcttcttaaatgtattccttttttattaagttccatagaactagaacttttgggcatgcacttgaatcttcttacattctttaatttttttattttttgcaaaataaacttttatttggagggacagcataatttagagtccaggctcttttacactttaaacatttatttatttatttgttttatatagacaaaaatatatatatttatcatgtacaacaggatgttttgaaatatatctacatcgtggaatgactaagtcaagctaattaatatacgattacctcatataacttttttttcttttttttgtggtgagaacacttaaaatctctcatcaggcgcgatggcttgtgtctgtaatcccagcactttgggaggccccggcaggtggatcgctgcttgaggtcaggagtttgagatcagcctggccaacatggtgaaaccttgtctccactaaaaatacaaaattagctgggcatggtggcatgtgcttgtagtcccagctatcgggaggctaaggcaggagaattgcttgaacccaggaggtagaggttgcagtgagcctagatctcaccactgcactccagcctgggtgacagagtgagactcagtctcagaagaaaataagttagcctgggccgggcacggtggctcatgcctgtaatcccagcactctgggaggccaagtcaggtggatcacctgaggctgggagttcgagaccagcctgaccaacatggagaaaccctgtctctactaaaaatacaaaattagccggacatggtggtccatacctgtaacgccagctacttgggaggctgaggcagaagaatcgcttgaacccgggaggcagaggttgcactcacgccgttgcactccagcctgggcaacaagagcgaaactccatctcaaaaaaaaaaaaaaaaaaaaaaaaattagcctgtatctagcaaggaagtaaagccagtaggaagctgatggtttgagggaatgagtgagtttaaagagcaagtttatggccaggtgcagtggctcatgcctgtaatcccagcactttgggaagctgaggctggagaaccagttgagctctggagtttgaggctgcagtgagctacgatcatgccactacactccagcctgggtgacagagtgaaactctgtcttaaaaaaagagcaagtttaggatgagtgggactaagaacttgaggaaaaggacctcttcatttacaaaaagtcaaggaaatatttgcagtggtcatgctttgggtttccagggacaagcattgactgaatacaccatagtgaagagaaatgcaatttaccacacatttgttgagagcctattgtggagaacaaacagcttgggaagtaaaggttgattacttcctctccaaggatgatatgtttaatgaattcccttttccttagcttcattcttcataatgccaaagagatccatggatatgattttccatatggagttgaatattctagttttaatattttctcttcacttgtcctggaaaaacatccccctataaaagaggtttagattaaaggtggatgtaagggtaaaataaagtaaacagacaaaatcaacaacatggaaaaacagcaggagtgatttaaacccagtttgaaccagcaggcaaggatggcatgatctcctagcatttaaaaatcctagggcagatgtggtcttctttggcttagagtgggaagacttatcaaaaattcagcaggaagaattcttctttttgataaattttcagacatattacactctggaatttcagccccctggatgtttttttgtctatgaagaaaggttagagtcttgttggctttgtttctctttgaatgcctgttatctaacatagtgcctgacacactgtagtactcaacaaatgttctctttgcaccccacaacttacagcttggtttagcagccccaagctccacagaggaaccaacatctcctgaagaagcctatgaggttagtgcttcctagcctagttataagagttgtgggcaagaagttcaaagttacatcttccttcctggtatttatggttcattcatagaatttcccatctagatgcaatttacaagtcaagcttgactttttccataggcaacattgcctggcgacctatctgatcttccaactttatcacgtttcttgggaacagagttagaaagttaacccaaggtcaaacttgtccatagagaaagagtttcattagctttttactcaaactctgtgcctaaaaaataaaagcatggagatttttctgtagagatggggtcttattttgttgcccaggcaggtctcaaactcctgacctcaagcgatcctcctaccttgttctcccaaagtgctgggattactggcatgagccaccatgcccggccaaagctaatgtatttcttaaagagagattcatatatacatgtatatatgaatatatatgtatattcatgtatatatgaatatatatgtatattcatgtatatatgaatatatgaatatattatgagtacatatgaatatatatgaatatatgaatatattatgactatatatgaatatatatattttatatatatattatatatatatatatatatatttttttttttttttttttttttttttttgagacagggttttgctctgtcacccaggctggagtgcagtggcctgatcttggcttgatcttggctcattgcaacctctgcctcccgggcttaagcaatgctcctgcctcagcctcccaaatagctgaaactacaggctacaggcatgcaccactacacctggttaattctttgatgtttctgcagagacagggtctcactatactgcccaggttatatttgatattttccccttccaaagatacactcatattattcaatttccacaatgttaaacgattttccttatttcattgtggagaaccaataactggaatgctggcagctttgggaattattttggattatctgggaaacctttcataggtcacagtcaacagttggcacttttactcttgttgagaataattaagcctaatattaatcaaattttttttttgagacagagtttcattcttgtcgcccaggctggagtgcaatggcatgatctcggctcaccgtaatctttgcctcccaggttcaagcgattctcttgcctcagtctcctgagtagctgggattacaggcacctgccaccatgcccagtggctcacacctgtaatctcagcactttgagaagctgaggcgggcggatcacttgagatcaggagttcgagaccagcctggccaacatggtgaaacaccatctctactaaaaatacaaaaaaattagccgggtgtggtggcgggcgcatgtaatcccagctactggggaggctgaggcaggagaatcgcttgaacccaggaggcagaggttgcagtgagccgagattgcaccactgtattctagcctgggtgatagagtgagactctgtctcagaaaaaaaaaaaagtgaaaagaaaagaagagacaggttctcactatgttgcccaggctggtctaaaactcctggacttgagtaaaaccatggcaatattgccctaaagctacctaactgtgactatggaaattgctactttgcattcagtgttgtgggatttgcacgggcagtactcattttccctcatacttcggattgaccacagttgttacggcactcttataaataggattttcacccgtgtcccatttggcattcattttctccttttcaaatttagcaaactcccttctgtcatgaattatcattaaaagcttccatatcagcagtaatgcaaggccaataagaacaattccagcaaccacaccagctacaattggaatgatgtctggaccagtgggacactctggattctccacaacatgaaccatgacctcgttgttcccattcactgaatacgtaaaatagaaccaacagtcgtcaacatccttctccttacaatgggacacaggatcaggttggaccggctggggtaatttgtcccgactttctaccttggtaatgttaaaataggaacattcctgtgtgcatgtgtctttcttttctcctttattgaaggctctgcactgaacacattctttatgctcagcacagacaccaaggcaggtctgacacatctcacacgtttgcccttgaaacttcggatctgtacacttacagacaccacactcgcagatgccccggccattgcagatctgtccgttgctggcttcacaagtactagtataatttttaaaatgttttattattttgaaaataatgttgtaattcatgccagggactgacaaaagacttgagacaggatggttattcttgtcagctaaggtcacattgtgcctttttgaccttttcttcctggactattgaaatcaagcttattggattaagtgatatttctatagcgattgaaagggcaatagttaaagtaatgagcatgatgagagtttctgttaatcatgtattaaaactgatttttagctttacaaatatgtcagtttgcagttatgcagaatccaaagtaaatgtcctgctagctagttaaggattgttttaaatctgttattttgctatttgcctgttagacatgactgatgacatatctgaaagacaagtatgttgagagttgctggtgtaaaatacgtttgaaatagttgatctacaaaggccatgggaaaaattcagagagttaggaaggaaaaaccaatagctttaaaacctgtgtgccattttaagagttacttaatgtttggtaacttttatgccttcactttacaaattcaagccttagataaaagaaccgagcaattttttgctaaaaagtccttgatttagcactatttacatacaggccatactttacaaagtatttgctgaatggggaccttttgagttgaatttattttattatttttattttgtttaatgtctggtgctttctgtcacctcttctaatcttttaatgtatttgtttgcaattttggggtaagactttttttatgagtactttttctttgaagttttagcggtcaatttgcctttttaatgaacatgtgaagttatactgtggctatgcaacagctctcacctacgcgagtcttactttgagttagtgccataacagaccactgtatgtttacttctcaccatttgagttgcccatcttgtttcacactagtcacattcttgttttaagtgcctttagttttaacagttcactttttacagtgctatttactgaagttatttattaaatatgcctaaaatacttaaaaaaaaaaaaataaaaaaaaaaaaaaataaaactcctggacttaagtgatccttccaccttggcctcccaaagtgttgggattacaggtgtgagccaccatgcccagcctctttttagatgtctattctgtcatttattcaaaaagccaaatatggaacgaaatgtcacatagtgcagaaagctcattctgtgttgcactgagcctgagttagtgcaatggaagaacagaataccagcaaccagattccagaagtatcatctttctaacagggctatgtcctcccccagaaaggtcccatgattccctgcacccatcctctgcaattatgcagagcagctggggcagaatccctcccctggagcctgttccatggcgtaccgtcactctgtgggcccacatccacatctttatggacagtgggcatttgggggaagatgatcactctgctatgcctacacttgtaaatttcccccagtgagagtctgtgttagattgcattggttctgatgatatgtttcacccatacatcttcacacagcaagaatacatatgaaaaccagcttaagtgctgttagtgagcagagaggagtcactgaggaacaatataacaagaatgaggaactcaaaccaggttatcgggaaaaggactcttcctcataccctccaggaaagcaagtttgtactaagactagctcctcaaagctaccctacgtttcccaggctggtgtcaaactcctgggctcaagcgatcctcccatcttagcctcccgagtagctaggactacaacgccaccacacctggcttcctttttttttttttttgagacagggtttcgctcttgttgcccaggctggagtgcaatggcacgagctcggctcactgcaacctctgctgcccggattcaagcgattcttctgcttcagcctcccgagtagctgggattacaggcatgtgccaccatgcccagctaattttgtatttttagtagagatggggtttctccatgttggtcaggctggtctcgaactcccaacctcaggtgatctgcccacctcggcctcccaaagtgttgggattataggcgtgagccactgtgccaggcctgtggcttcctttttattattattattttacattgtggaaattgaataacatgagcatatctttgaaaaaggaaaatataggccgggtgtggtggctcatacctgtaatttcagcactttgggaggctgaggtggtaggactgctcgagctgggagatcaagaccagcctgggcaacatagggagactccatctctctctctataaaaaaaattagtagggcatggtggtgcacacttgtggtctcagctactcaggaagctgagatgggaggattgcttgagcccaggaggtcgaaaccgcagtaagctatgatcacgccactgcactccagcctgggtgacagagcaagaccctgtctcttaaaaaaaaaaaaaaaggaaaatataaattaaaaactagaggaagctcagcaaacgaactcaggagcagaacaccaaacaccgcatgttctcacttgtaagtgggagctgaacaatgagagctcatggacacagggaggggaacaacactcactggggcctgttaggggacgttggaggggggagagcattagggaaaagagccgatgtgtgctgtttttgtttgtttgtttgtttgttttttagacagagtctcgctctgtcacccaggctggagtgcaatggtgcgatcttggctcactgcaacctccgcctctcaggttcaagtgattttcctgtctcagcctccccagtagctgggactacaggtgcataccaccacacccggctaatttttgtatttttagtagagatggggtttcaccatgttggtcaggctggtcttgaactcctgacctcaggtgatgcacccaccttggcctcccaaaatgctgggattacaggcatgagccaccatgcccagctaatgctgggcttaatacctaggtaatgggttgataggtgcagcaaaccaccatggcacacgtttacctatgtaacaaacctgcacatgtaacctcagaacttaaaaaacaaaaacaaaaacaaacaaacaaaaaaatcccaaactagaggaagtttgcagtgtcaagagaggagtatgtaaaacattagaacaattcagatgtttcacttacctcactgggttttgagtcaggacccatcttgctggaaagtgtgtatgtctcagactcagattttgattttacgatctctctaaaccacttttgatattgtttctggacctggaacatcaaaggaaatacctggatgggttttgctaacattggtgaacagcagaaaggtcggtgagtcaggaagaggatagagatgtattattatttatttattttcacaaaacatggtctattcgtacaatggaatattactcagtcttataaaggaaggagattctgacacatatgctaccacacggatgaaccttgaggacatcaggctaagcgaaataagctggtcatgaaaaggcacatactgtatgattctacttatatgaggtacctaaagtagtcaaatccatatagacctaaagtagaagagcggtttccagggcctggggggaaggagagtggcgaggtagtgtttaatgtggatggagtttcagtttgggaagatgaataaagttccggagatggatgttggtgatggttgcaccacattgcgaatgtgatgctactaatggtacacttaaaaatggttaaaaaggtaaattttatattatatatgttttaccacagtaaacattttcattacagggtatataattgttgtagaaaatttatggccaggtgtggtggctcacacctgtaatcccaccactttgagaggccgaggcgggtggatcacgaggtcaggagattgagaccattctggctaacacggtgaaaccctgtctctactaaaaatacaaaataattagatgggagtggtggctcatgactgtaatcccagctactccagaggctgaggtaggagaattgcttgaacctgggaggcagaggttgcagtgagctgagatcacggcactgcactccagcctgggagacagagcaacacttcatctcaaaaaaacaaaagaaaagaaaagaaaaaatagaaaatgtataagatatgcatatgcaaaaggaagaaaatagaagttgcatataattcctcaatctagtgaaaatcaccaataatattttggtagtacccttcaatgtgtcttggttttgggcacctcagaagcagaccctgcaacaagggtggaagtgtaaggagtttatttgaggggtgatcccaagaagcaccagtagggcaatgaggaagcaggacagggaagagaaggcagctggtaaagaatgcataattaaggttatttccactgtgggaatctggggctcagccccattcaggagctctggggtagagcatggaactaccttagagtcaacttgcctgaaggaggagggagctggggtatttatccaccagctcccatcagtcatgggttgatggccggtctcaagggccattactctttggcatcaccagtttgccctatgcatgggccaggcgtgtcctgtgggcagtacgaagccttcaggcacagtcatgggtgtttgcaacaagcaactccaggcatgtagagacagaagccaaagggatatgagagggccgtggacagcatctgccacaccgtgatatcctaaccttggcactgttgacatcttgggttggatcatgttttgctggagagggctgtcctgtgtgcattgtttaggatatttagcggtatccctgacctccaccaactagatgccagtagaaacccccaccccagtaatgacaagcatttccccagacattgctaactgtcccgtggtgggaacacaattgctcctggtaagaaccattctgatatgccataaacacccatacctacatataaataaatacataacaataacacaaacaatgagtgcttatactcgttatataaacaaaatgaaaccctctggggtagtttcttttgtttttttttgagacggagtctcgctctgttgctcaggctggaatgcaatggtgtgatctcagctcactgcaacctctgcctgccaggttaaagtgattctctagcctcagcctccctagtagctgggattacaggcaggtgccaccactctcggctaatgtttgtattgtttagtagagacgggctttcaccatgttggccaggctggtcttgaactcctgacctcagatgatctgcctgcctcggcctcccaaagtgctgggattacaggcacgagccaccacgcttggctgggttccattgtggagacagcgtgcagtccagattatccctgagcaccccttagtaagggatcttcttggaggacacagactactgttcagttgcagacaaataaagtgttttgaatttagtagccatatgaaataaaactatatatatctttaaaaactggatgctaggccaggcacgatggctcacgcctgtaatcccagcactttgggaggctgaggcaggcagatcacctgaggtcgggagttcgagaccagcctgaccaacatggagaaaccctgtctctattaaaaacacaaaattagctgggtgtggaggtgtgcacctgtaatcccagctactcaggaggctgaggcaggataatcacttgaacccgggaggcagatgtcgtggtgggctgaggtcgtgccattgcactccagcctgggcaacaagagccaaactctgtctcaaacaaaaaacaaaaaacaaaacaacaaaaaaacgaataacaaaaactggatgctatgatatgcctcacaaactgagataaactaagggaagagtacatataagtgttttgcgtatgctcatgtgaaaccccatctctactaaaaatacaaaaaaaaaaaaaaattagccaggcatggtggcatgcgcctgtagtcccaggtactcgggaggtggaggccgaagaatcgcttgaacctgggaggcagttgcagtgagccgagattgagctactgtactccagcctgggtgacagagcaagaatctgtctcaaaaaataaataaataaataaataaataatgatgatgatgacgatgaaacacacactctgctagtggtgcctgtgaaccaagtggagatgagttctgcctcctgcctcagcctcctgaagtactggaattatgggcatgagtcactgtgcctggccccagtttctctttaacgaggcagttaacctgcagtacagtgaagttcaagacctcatcatgcccactgctgttccatggtttgagatgtgagttgcaaaaactgcaatagcagactgggatggatctatgagtttgcccctgcagacagccagtgttacaaggaaggctgtgtgatcctggaatgtgacctagtttgggacagtgacagctttaaggggcagatatcatctgatatgtcttgaagaaaaagagataaatcagtccagcatggtggcttacacctgtaatcccggcactatataattggtattgactggaagcttcttctttttctcttttttttttgagacggagtcttgctctgttgcccaggctggagtgcagtggtgcgatctcggctcactgcagcctctgcctcctgggttcaagtgattatcctgcctagcctcccgagcagctgggattacaggcgcctccatcatacccgggtaattgttttgtagtttttagtagagatggggtttcgccatgttcgtcaggctggtctcaaactcctgagcacaagtgatccccctgtgctggcctcccaaagtgctgggattacaggcgtgagccactgcaccctgccgattggaaactttttctgaaatagggcagaactgcttgggtgtttttttccatgtaacttaaggtagtaatgtaaataaaatagtagttggaaaaaaaataattcatgtgaagtggtgtgttagctgcattgttgatctccacgattcactcctttgtagttgtattacactctgtcttagtctcttggtgggttgagtgttcttttctcattgactttgggcttgggtgtgtgactttctttggctaatgggatattagtagaggaagaatcacaggcttgagtgaccttgcccagtagggtctgcctctttgtgatttcagcattgttaggagaagaatatttgctggggagttgctcccccttctgcttaagcctcaggatgagtcacaaggagcaggcctaaatctgatctgcatcctggagcaaaggcaagctgagctcagctaagatcaggtgaaccccaatagacctgtagaccccagaataagaaaagcaaatatttgtgtttaaaccaatgagattttttgaggttgtttgttacacagcattagctgactattacgagtgggaaaactgagaaaaaggcatgatttttttttgacatagcaattatttatattctgaaatgtgttaataaatgatgtatcttaacaactagtagcatttttaaagtagagaaaatagagagagtgtttacaggtggattataatctcatgtggaacatttagagaatgtcaacttaaatccccattgaactccatttccaaaattttcttaagtttaaataacaaagaaaggggtcagtgtttacctgctggctgaggaggcagtagaccaagaagatgaagaagccttggaggctgttgatgatggtgaagaggtaggccatgacctgggcagctggacccacctgtagcaagcccagacaccatgtgcagcccaggatgaagagctgagctgttgctttgaaagccagcatcctgggaggaggaagtcagagattaggatgtcaaaaaactaataatgagcatgaacacccctctagttagctgttaatagtaagaactctggagctagactacctgagtttaaatggaagccagcactggctacctgtgtgatcttgtgaaagctgctttaccttcttgcaactcagctccctcatcttattttattttattttattttattttatttttgagatggagtcttgctctgttgcccaggctggagcacaatgacatgatctcgactcactgcaacctccacctccagggttcaagtgattctcctgcctcagcctccccagtagctgggactaactacaggcatgcaccatcatgccctgctaatttttgttatttttagtggagatggggtttcgccatgttgaccaggctggtcttgaactcctgacctcaagagatccacccatcttggcctcccaaagtattgggattaaaggcgtgaaccactgcacccagcctcagttcccttatcttaataattgtcctatttcgtggggttgctataaagattacatgagactttaatgggaaagtatttaggacaatgtatgggacaaagttagtaccagacatgcataaggcatttgaaaacctgggtgctttctctctcactcttatcatttatagacaggggtcatataattttttttgttgagacggagtctcgctctgtggcccaggctggagtgcagtggtgtgatctcagctcatgggttcaagcgattctccagcctcagcctcccgagtagctgggattacaggcacgtcaccacacccagctaatctttgtatttttagtagagaaggggtttcaccatgttggccaggctggtctcgaacgactgacctcaaataatccacctgcctcggcctcccaaagtgttgggattacaggtgtgagccaccccacccggccggggtcatataatttgttattcaaacaggaaggcttttgtgatcaaaaggaggtgtactgttcctaacagaaagaaatgataaatgtttgaggtgatgagtaccttaaataccctgatttgatcattgcacattttatgcatgaatcaaaatatcacaaatactttgtaaatgtatataaatattatatatcaataagaataaaaataataataaaaaatgaaagggatactattaataattacattgtgtcgacagacataaactgagactgttccaggtaagctgagatatgaggccatcctatttatagtatttatggcatatatacacacacaatatatatatgtacatatatattttatatacactatcacaacatataatcacaatatatagtgatagtgtatataaaaatatacattgtgttatatatgtatagaatatattatatgtgtatgtatatgtgtgtacatacacatataatatctatattacatgcatatatacattatatatatccctaattattaaggatattacatcagtgaggaaagctaattgaggaacagtttgtatagtgtgatcctattgtgtgtgtgtcggtctgttctacttaaaagtgcacagagaaagctctgggaaaatgtcatattttatctcacacatcatacaggctgttaattctggcttcctgggaagtggaagtagcaggaagagggacagccattttcattttttactgtatatatttcaaaagactataaaaaaatgtaacaaagttgtcttatttttatgattaaaatgaaaacaacaaattacatgctcaaattaaaatggatgctgcaacataaaaatactcatacctcaagatattttgaaatattatacaagatatcttttaatctagattcttattgaacctatcacacacgattggagataaacatttaaattggtatatgtacagagagtttaatttgtaatttaagcatgtgatttaatatagctagattgatctctattggctggggtggacatagctttgtgacattaccagattcatttttagggtttctatataatttaagcttcttagtaactgttggattagcaaatttgagttggttgcttttgataaaaaatatactcctgtgtgtatcttgtgtagtgtggcagaaacgaatgtttttctcccttttcatcttccttttagtgttagatctcttcccctttgagttttaaaacaaggcacatggtcaaggtagagactacatttcccagcctcccttgcagctgggtgttatcatgtgacaaagatcagccaatgggatatgagcaaatgtggcaactgcaactcctatattacctccttcccatggatgggatattgacaagggcaacatccttctagaggatggtggagcaacaaagtagaaagcacctgagaccctggaacactgtgtggagcagagcttctttattagccctgaactggtcacttctgggttgcaacatgagactgaaataaacttctattttattcttttttttttttgagattttttctttatcacagcagcttagcttgtattctagctaactcaggttctcattaactgtgatggtggaagattacagtggtcttgctagtcctgggagcatggctgttgaatgtacgtgtgtatggatatgtaggaaggactggcagaaggaaagggaataggaagtaccatttgtcacatcctaccttgtgttctggatggttgacacttcactattgagggaggaaagttttcttttcaaaatccaaaagaccaagataaacaatactaaattcgcctgcaggaccaacacaaacaaggcagagtgcaagttaaagtaatgtatggtgtccactttaaattgcacacaggagtcctaccctcttgtacatgggactgaattggtagcaggtggaaaatcaaaccacccaacagtggaaatgcaagccccttgtaccatcttgtacccagcacttctcttggttcttcctagtttgggaacatcgaaggcacatactcacagagaaaatggcacagactgggccaaggaaactccacatgaatccctggtccaggtggagccagcatctaggaacagtgggaaaagagatacaaagagagatcagagaaagtgcgtgagatcaacataaagtgtctcttttcctaccagagaattgtttccagtttctcttgaaagtcagctgatgacaggccaggcacggtggctcacgcctgtaatcccagcactttgggaggccgagatgggcggctcacgaagtcaggagcttgagaccatcctggctaacgtggtgaaaccccatctctactaaaaatataaaaattagctgggcgtggtggcgggcacctgtagttccagctattcgggaggctgaggcaggagaatggcgtgaactcggtaagcggagcttgcagtgagccaagatcgcgccaccgcactccagcctgggcgacagactgagactccgtctcaaaaaaaataaaataaaataaaataaaataaaataaaataaaataaaaagaaagtcagctgatgacaatagcttttttttttttttttttgagacagggtcttgctctgttgcccaggttggagtgcagtggtgcgatctcagctcactgcaacctctgcctcctggattcaagtgattctcctgcctcagtctcctgaatagctgggattacagatgtgcaccaccacacccggctaatttttgcatttttagtagagatggggttttgccatgttggccaggctggttttgaactccagacctcaagtgatttgctccccttggcctcccaaagtgctgggattacaggcgtgagccaccacgcccggccaacaatcagctttgattacacattttgattgcaactttgatccacacatcatgtgacagccactttcactttatatatttcaatatatatatgaaattttatgaaaattttatgaaaattttaacaaacttgtcttatttttatgattaaaatgaaaacaacaaattacgtgctcaaattaaaatggatgctgcaacataaaaaatactcatagctcaaggtattttgaagtagtagtatacaaaatatattttcatttagagccttattgaacctattacacacaattggagatacatatttaaattggtatgtgtacagagagtttaatttgtaatttaagtatgtgatttaatatagttagattgatctctgttggctggggtggacacagctttgtgacattaccagatttttggggtttttatagaatttaagctttttagtaactgtggtgtgatttaggataataggcaccaaacagctaggaggaacagcgtcctgttaagcattttaggagcacagtcctgttgaattttcacaccagcactgtgaggttggaacaatggggacaactattattctcatctcgctaatgaggggactgagactggagagctcaaattacaggaagaataaagttgggacctaactcttgtgatccgagagattgaaatagacacttctatatccactaacatggatcctaaggttaaggaaaccaagttacccatgggtcgggggttcagggcctggctggtgaagcaactgtctaaattcctcggctacaagaaaacccacgcttgctaaactccataacaatacgagccatcagttccctcctacctctgatatacgatccagaccactataactctgactggaaagggaaccagtcaaagcaattatggatcttaagccagtttcagttagtttatagaggctgtgcacaaactgtctttgtgtcctttggttcaacttttggtgtagagccacattcctcgtcattgtttattttattttatttatatattttttagagttggatcttgctctgtcactcaggctgtggtgcagttgctctatcacaacttactgcaaccttgaactcctgtgctcaggcgatcctcccgccccagcctcctgagtagctgggactacaggcatgcaccaccgtgtccagctaattaaaacaattttttttttttggtagagatggggttttgctatgttgcccagcctggtcttgaagttctgggctcaagcaatccttcctccttgccttcccaaagtgctggggttacaggcgtgaaccaccatgcctggtcttccatttttttttttttttttgagacagagtttcgctcttgttgcccaggctggagagtgcaatggcgtgatctcagctcactgcaacctccacctcccgggttcaagtgattctcctgcctcagcctcccaaatagctgagattacaggcgcgcaccaccacgcccggctaattttttgtctttttagtagagacggggtttcactgtgttggccaggctggtcttgaactcctgacctcaggtcatccacccgcctcagcctcccaaagtgctgggattacaggcttgagtcactgcgcccagcttttccatcttattttaatgctaaaatcctgccccaaagtgaacatgggatatatgttatatatatgtttatccattgtgcatacactctgctctcatcttaaataggtacagcttttccaaacctcctgaatgtgtatgactctgttgtgtaatacagatctagtgaggcataaaacctaacttgtccttccccttttcaaagagggagcacctttggttcatcctggagactttctttttttggtttgcaaaccagtattgccaataaagctctcctttctctctctttctctttctttcttccttccttccttccttccttccttccttccttccttccttccttcctttcctttcctttcctttccctttctttctttctttctttctttctttctttctttctttctttctttctttctttctttctttctttcttcctttcctcctttcctttcctttccttcctctttctttctttctttctttcttttcttttcttttttctttcctttttcttttttttttcagagtctcactctgtcgtttaggttggggtgcgttggtacaatcacagctcactgcaacttccacctcccgggttcaagcgattctcctgcttcagcttcctaagtaggtgtgtgccaccacgtctggctaatttttgtatttttagtagagatgggttttcacatgtgggccaggctggtcccgcactcctggcctcaaacgattctcccgccttggcctcccaaagcgctgggattacaggcatgagtcaccgtgcccgaccttaaagctcttctttctattatttattcatcttgatggtcttttgaacaacaccccaaaccctctccttctgaagccatccctataaactttataaaaataatcagagaagacaaaacggggagaaatgaaaacaagccaaacttgcagcacatccaggattcactgccaggtcagcttgctctctgacctgcttcctactagctgtttggtgcctgttatcctagaatcacacagatcctagataacagtttccctttactgctctataggtaacaacttaaatattataaaacatgaagtttcagccaggtgtggtggctcacacctgtaatctcagcactttgggaggccgaggtgcatggatcacctgaggtcaggagttcaagaccagcctggtcaacatggtgaaaccccatctctactaaaagtacaaaaattagctgggcgtggttgtgggcacctgtaatctcagttacttgggaggctgaggcaggagaatcgcttgaacccgggaggtggaggttgcagtgagccaagaccgtgccattggactccagcctgggcaacaagagcgaaactctgtctcaataaaacaaaaaaacaaaacaaaaaaaattaagtttccccttgagatattctttcaggtcctgtgtaccagtgaaactactggcttcagctgctctgaaggaccacagaaggagctgagtcaccaaagaaggcagtttccgtctcctgatgattttgtctgctgtaccctgacccacattttccagcctccacaccctccatgatccctttaaaagtcccagtcccgaactccttgaggagattgatttgagagtcttctctcatcttctcgcttggcgccctgagatttttaagctcttttttttttttttttttgagacaaggtcttgatctgtcacccaggctggaatgtagtggcctgagcatagctcactgcagccttgaactcctgggctcaagcaatccttccatctcagcttcttgagtagctgggactacaggtgtgaaccaccatgcttggctattttttttttttttaatctttagtagacacaaggtcttgctatgttgcccaggctggtcttgaagttgtgaactcaagtgatcctcctgtctgggcttcccaaagtgctgggattacaggtgtgagccactgtgctcagctaattttttgtagagatgagggccttgctatattgcccaggctggtcttgaactcctggcctcaagtgatcctcccacgttggcctcccaaattgttggtattacaggtgtgagccaccacacctggcctcattaagctctttctctgctgcaaaccctgctgtcttggtggattggtacgttactgtgcagtgggcatatgaacctgttggttgtataagacttccagaaccttgcaaactcttaccaccatctcaccctgctttgttgggaaagaggttagagctgttataaaggagaacgtagagtgcattggttacgtatattcccaccatcatcatgaatgctgccctcaaaagctttcttaggaaactgtccatgacacaaggtgggattcaagctcaccgatcagcagttccataaaggtgaggccaggaggctgcagaaatggccacagtcacagcgggaacgccatagccgactgggaacatgatccacttcatgagtctattgatgcttgagtagttgaccactgtcaggttccgtgcagtgaggaagaggtgcacaccctccagcagcatccaggtgaaggcggccaggtagagatagtgcaaagcaccggcgatgatggagcacagcacctgggggaggagaaagggatgcctgaaggggttgtcagggtggagtatggccctaggacctctccttgacattggctttgggttcagagcacctgacatcagaccaagggcactaaaagtaaaggggaactggatgcagtggctcatgtctgtaatttcagcactttgggaggctgaggtgggaggattgcttgagcccaggagtttgagaccagcctgggcaacttagtgagaccccatctcaattatatttaaaaaaatagatagttgatagtcaaggatagctttggccacctgggcaccaatcccttcaacctgcccttgggactgaaagggtagcagaatgtgccacctccacctatgccactttgcaacagatcaccagaatttacccctccttttaaactaagactttgtatactttgagctatgtctcctttcctcatccacttcccccctcaacctctgagaacctccattctactctctactcctactgtattgcgtggtgactatagttaatatattatgaattttgaagttgctaaaagagtggattttgttctattttatttctttgtgacaggatctcactctgtcacccaggctggagtgcagtggcacaatcatagctcactgcagccttgaactctcaggctcaagtgatcctcccacctcagcctccctagtagctgggactacaagtgtgtgccaccatatccactaatttttgcagagacggggtctcactgtgttgcccaggccagtctccaactcctgggctgaagtgatcctcccgccttggcctcctaaagtgctggtattacaagcatgaaccgccaccccagtcctaaaagagtgaattttaaatgttttcaccacaaagaaatgataagtatggaagtgatagatatgtttattatcctggtttggtcatttcataatgtgtatgtctatggaaacttcacattgtaccccataattttatacatttattatttttcaattaaaaataaaatttagaaaaaagtttcactttagcataagagattattattatgattatgattcttttttttttgagacatggtcttgctctgtcacccaggctggagtacagtggttgcaatcatagctcactgcagcctcgaactcctgggttcaagcaatcttcctgcctcagcctcccaagcagctgggactacagacgtgcaccactgtgtccagctaattttgttattttttttgttttttttgtagagacaaggtctcactatattgcccaggatggcctcaaacgcctggcctcaagtgatctttccaccattgcctcccagtgtgcagggattgcaggtgtcagccactgtgtctggcccaagggattattttaaactgaaggcagttgagaagaagcagatacaaaaatagctctctgccctccccctatttgcctaaaagcaggacatacgtttttgtacttgtcttttttggggggtgagaacacttaaaatctactttgttagcaatttttcaatatagaatatattgttattgactatagtcatgatgtacaatagctctcttgtatttattctttccgtctagctgaaatttggtatcctttgaccaacatctccctaaaccccttccctgctgccttagtctctgctaacaaccattcccctctttggttttatgagtttggctattttagattccacacataagtgagatcatgcactgtttgtctttctgtgccttgcttatttcactcagcttaacaatctccaggttcatccatgttatcacaaatggcaggatttccttctttttctgaaggctgaatagtattccaggacattagtttacaaaggcattcctcatacctattctcttccttctaccctcctacccttgctatgggggggacaaaagttgatcactaagacaacttatttatttatttaagatggagttttgctcttgttgcccaggctggagtgcaatggcgcaatcttggctcactgcagcctctgcctcccgggttcaagcaattctcctgcctcagcctcccaagtagctgggattacaggtgctcatcaccacgctgggctaatattttgtatttttagtagagacggagttttgccatgttgaccaggctggccttgaactcctgacctcaggtgatctgcccacctcagtcccccaaagtgctgggattacaggtgtgagccactgtgcccggccaccgagacaactttagatcctcattggtctggagccaacaccagaggaatctacaaaaccaatgatatggtttggctctgtgtccccacccaaatctcatcttgaattgcactcccataattcccaaatgttgtggggaggacccggtgggagataatttgaatcatgggggcggttttccccatattgttctcgtggtaggaaataaatttcacgagatctgatggttttatcaggggtttctgcttttggatcttcctcattttttctcttgcagccaccatgtaagaagtgcctttcgcctcccgccatgattctgaggcctcccctgccatgtggaactgcaagtccaattaaacctctttttcttcccagtcttgggtatatctttatcagcagcctgaaaatggagtaatacaaccaatgatactagtaagcctttatctatcactcatttcccagatatttgccttcccataatttgtgcccctagagagccaagatctttttcccttcttcaaaaattcatcattctttgtcaaaaacgctgtcgttctaaactacctctttgagaatgcctcgttacctgggtatctcccatgtatatatgaaatatgaatatatgttaatgaacttctgtttgctttttctcttatctgtcttttgttacatgggtcccagctacgatctcagaagggtagcgggaaaattatatttttctcctctacagacccaaggacattttattaaggaatctagtgcagcattgctccatgagctcagtgtaccttggggcagaaagggcatcctctgagacactgtcagtaccttgggttcagttcgatcaatccccacgaggaagaggaggtgggccaggaagaggcagagcgagagctgcagatgcagtgaggtgctggtgttccggatggctttacacaggagaaaagtgagggccgccaggaggaggcacagcagagagacgctcagccccacgtaggtgatgacagtcagcacgggatcctcctcctgggaccgagaaaaaaagttcacagtgatgctttcctgcactgggattatggctccctccttgaactggggcatcctagacacaggcaccaagcccagtggtagtgtgggaccgttagactgctaatgtagattgctaatgtagactgctaatatacactgctaatatagatggctaacgtagattgttaatgtagactgccaatgtagattgttaatacagactgctaatgtgattgttaatgtagactgctaatatagattgctagactgtcttttttattttcagctttattgaggtgtatacttaatgtatcaaaaattactcatattaaatgtatacactttgatgagtttggacatatgatttttttcccctaaaaaaagtagaatggcagttaccagaagctggggagaggagagagagagaatagggagttggttaaggagtgaagagtttcagtattgcaagatgaaagagttctggagatggatggtggttgatgattgcacgatatgattgtactttactgaactgtatatacatttaaaaatggcttagatggtaaattttatgttctgtgtattttaccacaatctttacaaagtgatttttgggccatggtgtctcacacctgtaatcccaatgctttgggaagctgaggtgggaggattgctggaggccaggagttcaagaccgacctgagcaacaagtgagaccccgtatctaaaaaaaaaataaagtgtctttgtatgcagagggcttgtgctatgcagtaccagtttgatcagagagctcatactaatgaagggatttaaaaaacttttttaagttcagagatacatgtgcaggtttgttacataggtaaacccctgtcgcgggggtctcttgtacagattatttcatcacccaggtattaagcttagtacccattagttatttttcctggtcctctccctcctcccactctccaccctctttgtgtctgttgttcccctctttgtgtccatatgtctcctcatgtagctcccacttataagtgagaacacgagtatttggttttctgttcctgtgttagtttgctaaggataatggcctccagctccatccatgtccctgcaaaggacatgatctcattcttttttatggctgcatagtattccatggtgtatgtattccatatgtaccacattttctttatccagtctaccattgatgggcatttaggttgattctatgtctctgctattgtgaatagtgctgcagtgaacatacatgtgcatgtgtctttatgatagaatgatttatattcctttgggtatatacccagtaacaggattgctgggttgaatggtagtcctgttttcagctctttgagaaagtgacatgctgctttccacaatggttgaaccaatttacaaccccaccaacagtgtgtgttcctttttttctgctacctcaccagcatctgttattttttgactttttaatagtagtcattcatgatgtggtttatagtaatcatggtttttttttttttttttttttagacagagtctcgctctgtcgccaggatggagttcagtggtgtgatctcggttcgctgcaacctctgcctcccaggttcaagcaattctcctgcctcagcctcctgcgtagctgggacaacaggcgtgtgccaccacacctggctaatttttgtatttttagtagagatggggtttcaccatgttggtcaggatggtcttgatctcctgacctcgtgatctgcctgcctcggcctcccaaagtgctgggattacaggtgtgagccactgtgcctggcccagtaatcatatctttgccctggggtcctatagtctgagcaactgaggtcaaccatgtaggcattgcatccctatgtgaatgatcccccaatacacaccctgaacaccaaagctctggtgagcttccctggctgacaacacttcacatgcgttgtcataagtcattgctgggagaatgaactgcatctgtgtgactttcctgggagaggacactggaagcttgcaccaggtttctcctggacttcttaccttgcgtcttttccacatgttgatttttttttttttgagatggagtcttgctctatcacccaggctggagtgcaatggcttgctctcagctccctgaaacctctgcctcccaggttcaagccatcctcttgtctcagcctcctgagtagctgggattacaggcatgtaccactatgtttggcgaatttttgtatttttagcagagatgggtttttgccatgttggccaggctggtttcaaactcttgacctcaggtgatctgcccgtcttggcctcccaaagtgctgggattaaaggcatgagtcaccatgctcggccttttttcagtttttttttttttttttaatagcacttattaccacttagtaggggctcagaaagtatttgctggaagaataaaacatatacatcatacctggctggtcagggccatcaggacagcgaagctggacaggtgactgcaattacacatggtgtgactcttgttcacgtgtatcaggaagcagccatccctggaccactggctgccctgccctgtgctcttccagtagacacagaagacctttttggtactgggggtcatctgaaaatagaaaatagaaagggctcattgtctttgtctttctttctttcttttttttttttggagacaaaatcttgctttgttactcaggctggagtgcagtggctcaatctcggctcactgcaacctccgcttcctgggttcaagcgattctcctgcctcagcctcccaagtagctgggattacagacgtgcagtaccacaccaggctaatttttgtattttttgtagagacagggtcaaccgtgctgcccaggctggtctcgaactcctggactcaagcaatcttcctgcctttgcctcccaaagtgctgggatcatacaggcatgagccactgcatctggccagctcattgtctttttcctcaggagggacagttctcagtgttggcctatgccagggtgccacctgctaaggcacctgtgtgaagagtgactcaggtgatttctgttttgtttgtttgtttttgagacggggtctcattctgtcacccaggctggagtgccgtgacgcaatcacagctcactgccaccttgacctccctggctcaaacgatcctcccatctcagcctccagagtagctagaactacaagtgtgtaccaccatgcccagctaacttttgtatttttagtagagatggggtttcaacatattgcccaggctggtcttgaactcctggcctcaagcaatcctcctgccttggcctcccaagaggctgtggttatgggcatgagccgctgtacctgatttctattttatgcggccaccaggacccccgatccataaccgcagctcttttgggattttatgtaacataaaataaagcaaaggctccctgggaaccacagtttcaagagatttctttggttttagaaccttgccccaaccatgggaggaaaaaaacaaaaaaaaacccaaaaaaagcagtggagtctgaagctctcatgtttttccctaaagtctctctaagccaaatgtccctggtcgttgtataatcaattttgtctctactcccttacaacacaataattgcttatgcaatgagaggcatgatataggaaagaaaagtcatgaggagagagaataaaatgagcctttgaagccgggcacagtggctcatgactgtaatcccagcactttgggaagccaaggcgggtggatcacctaaagtcaggacttggagaccagtttgtccaacatggccagacatcatcgctactaaaaatacaaaaatgagccaggtgtggtggcacttgctcgtaatcccagctacttgggaggctgaggcaggagaatcgcttgggcctgggaggcggaggttgcagtgagctgagatcgcaccactgtacttcagcctgggcgacagagactccgactcaaaaaaagaaaaaaaaaaaagaaaatagaaaaacaggtcggatgaagtcgttcatacctataatttcagggttttaagaagctgaggtgggagggttgcttgaggccaggagtttgagaccagcctcgacaacattatgagtccccctctctaccaaaaataaaatagttagttgggcgtggtggcacacacctgtagttccagctgctggggaagctgaagtgggagagtcccttgagcccaggagtccgaggctgtagtgagctatgattgtgcaactgcactccagcctggacaacagaatgagaccctttctcaaaaaaggtaaagatatagatcaattaactttaataataaattttatttaacccactatatccaacatagtatcttttaaatatatcagtataaattaataaatataatcaacatagatattatcaaggagatattttacattcctttcttcttctctttctttttttctgagacggagtctgactctgttgccaggctggagtgcagtggcgcgatcttggctcaccgcaacctccgcctcctgggttcaagagattctcctgcctcaccctcccaagtagctgggactacaggcatgtgccaccatgcccagctaatttttgtatttttagtagagatggggtttcacgaagttggccacttgatcacttgacctcatgatccccccaccttggcctcccaaagtgctgggattacaggtgtgacctttcttcttttctttttttgttttgatttactttttaaaaatgtatttttaatttatacattataattgtatatatttatgggatacagtgtgatttataatacttgtatttgcataccatgtagaatgattacatctagctaattctttttttttttttttttgcatttattcttattggttctctgaaactcctggatctgtggtttggtgtttgacattggtttggggaaattctcagtcacttccctctctctcttcctccctccctccctccctccctccctccctccctccttccttccttccttccttccttccttccttccttctttcctctttgtttctttgtttcttttcttcttctccttactgtttttcttcttcttccgacagtgtcttgctctgtgccccaggctggagtgcagtggtgcaatcatagctcactgcagcctccaactcctgggctcaagcaatcctcttgcctcagcctcccgagtagctggaagtataggagcatgccaacctgcctggtttaaatcaagctaattgttttcttcttattaagtcttcaaaggctgatttacaagatgtaaatctggaaatactgtcttcaaaatctcgattcagaccagctacatttcaaatgctcaatagcgacaggtgctcctgactacgaccctgaacagagtgggtctagaaccacagcctgggatgatacacacatcgtttggcctgcctccttgagaacccacaagctcaaatcatacctgtgacccaccttcacgtgctggaaagtcagcgtcacagacttggagagagacacgttccttttgggtccaatagcagcactcacaacctgagagttcagatacacttgatctttcttatccatctcttcaaaaaaagttgcatttatgatgtttccaagagaagaatatgagataaaggcaatggcactgggacctgaggaaacagaaagatggaatcttttttcttttcttttctttctttttttttttttttttttgagacggagtctcgctcttgtcgcccagccaggctggagtgcagtggcgtgatcttggctcactgcaacctccgcctcccgggttcaagtgattctcctgcctcagcctcccaagtagctgggattacaggcactcaccaccatgcctggctaattttttgtctttttagtagagatagggtttcactatgttggccaggctggtctcaaactcctgacctcaggtgatccacatgtcttggtctcccaaagtgctgggattacaggcatgagccaccatgcccggtctgccgttttttagaagagttgttctcagatggagcttaaatcctgtgatccctggaggattcgttttaacagagtgctggcaccgggcatggtggctcacacctgtaaccccagcactttgggaggctgagggggtggtggatcacttgaggtcagaagttcaagaccagcctggtcaacatggtgaaaccctgtctctactaaaaatacaaagattagctggttgtggtggcacatgcttgtaatcccagctacttgggaggctgaggctggagaatcgcttgaacccaagaggcggaggctgaagtaagctgcgatcacgccactgcactccagtctgggtgacagagtgagactccatctcaaagacaaaaaaaaaaaaaaaaaagatgttttcctacaaacaacccactttttgcattttctggaaacttcaaagtctggtaacactgagacaatgaataataatctatttcttcctacaaaggctgtaggtacggtgggcaccctggctcgaatccctggcattcttggtttctttaatatgctgattaattctgctgtaagcatcggtgattctgcctgggaacttccatgggcgtgaatttgtgtttggcctgcacagaggacaggctggaagagcttgaaagttcagcccccggagcaaccctccaccaatgatagatcagagcagatggacagacgtcctagctccctcttctcgaatgggacagctcagtgagattgagccccaggtaccccaacagcaagctgctcactcaggtacctacctcattggctgcctttacttgcctgtcttactttgcctcttacctactgtgatagttcattttacatgtccacttggttaggccatggtccccagacatgaggcatggatgttgccatgaaggtgttttaaagatgagattaatatttaaatcagtagactgagtaaaacagattgcctgctataatgtgggtgggccttatccaatcagttgaaggcctcaagagaaactagactaaggtctcctgagaaagaggtagttctggcctcagactctctttggattcaagctgcactatcagttctaccttgtgtctcctgcctgcctgcccaccctgcagattttggacatgtcggccttccatagtcacgtgagccaattctttaaaatgactctcctcgtccctcctcatctctttctttccttctctctccccatctctctctttccatctctctcccccatttctctctccccatctctctctttcgatctctcttttgatctctttccacatctctctctttccatatatctctccccatctctctaattccatctctctctccctatctctctttccatctttctccccatctctccccatctctcgaattccgtctctctctccacatctctctctttccatctctctccccatctctctctttccacctctctccctctctctcttttcatctctctctccccatctctctctttccatctatctctttccatctttctctccccatctctttctttccatctctccatctcgcttttgatctgtctcttcccatctctcgcttttgatctccctctgcccatctctctttttccatctctctccccatctctctttccatctctctctccccatctctctctttccatctctctccccatctctctaatttcatctctctctccccatctctctctttccacctttttccccatctctctcttttgatctctctctccatctctctttttccatctctctctctccatccctcttttcatctctttctccccatctctctctttccatctctctccatctctttctcctcatctctctctttcgatctctgtctttccatctctctctccatctctccctccccatctctctctttccatctctctccatctctttctccccatctctctctttcgatctctgtctttccatctctctctccatctctccctccccatctctctctttccatctctctccatctctttctccccatctctctctttcaatctctgtctttccatctctctctccatctctccctccccatctctctctttccatctctctccatctctttctccccatctctctctttcgatctctgtctttccatctctctctccatctctccctccccatctctctctttccatctctctccatctctttctccccatctctctctttcaatctctgtctttccatctctctctccatctctccctccccatctctctctttccatctctctccccatccctctcttcccatctctctccccatctcttgcttttgatctctctctccccatctctctctttccatccctctcctcatctctctctttccatctctctctactcatctctctctttccacctctcttcctatctctctcccccatctctctctttgcatctctctcctctccatctctgtccccatctctctctttccatctctcttcccttctctctctttccatttctctccccatctctgtctttccaccactctccccatctctcttttctcatctttctctttccatctctttccctatctttttccatctctcttcccttctctctttccatctctctccccttctctctctttccatcgctgtccccatctctctctttccatcgctctccccatctctctctttccacatctctctccccatctaattccatctttctctccccatctctctcttcccatctgtctctccccatgtctctctttccacctctctccccatctttctctccatctctctttacccatctgcctctccacatctgtttctctccatctctctcatctcttgctctctgtctccatctctctctctctctctctctctctctctctctctctctctctctctctctctcccctcttcccacacccccccacaccctacactcttcagctctttagttgtgattctctggagaacactgatgaatacacccactgttgttcctggggatcacctcccaaagaaacttctcacacttctttcagggtttgcttctgggtgaacccaaaccgggacacaggcagaacagcactcccccaccatcccaaattgcaaagtccctcccatactgaataacagaaaacctccattttgggaaaatgtcttttttttttttttaaagggaaaatctccaatatcgtagtttgagggtaaaaagcccatgaggggagagcccagtgggcttgtttccccatgactcacacaatgacatggctctgtgtgaaggattctgaatgcagccatcaggcataccttgtgtgtctccctggatgatgtcactgcaacggatgtccattgagttcatttggacgttcaagttgaatgtctttctttcttcagagcaattgtctgtaatcgcttgagtttcaatagctggtaagaaaagcaatgggcaggcttagtgatattgtaagaaactttaaaaatatgcataggaacaggacatggtggtgcatgcctgtagtcccaactactcaagaggctgaggcagaaggattgcttgggcccaggaatttgagcccaggcaacacagtgagatgctgcctctaaaaaaaaaatgttcatagcaacataaatggctcacatatactgaatgtctaggatgtgtcgggcactgagctaagagtcttacacatgtcaccttataaacctataacttcatcagggacaactctatagatgaggaaactgaagtcagaagttaggtaagactctaattcctgaaaccaagttcttaactaacagctcttagcatacacctttgaagatacagttctatttctaggagtttattctcagaaaacgattgtggatggagggcagatttagctacaagaaagttcatagcagcttagatgataatggtggaaaatgggggattatctagatgttcaacaagaggtgattgattaaataagtgatgatatgggctgggcacagtggctcatgcttgtaatcccagcactttgggaggccatggcaggtggattgcttgaggccaggagttcaagaccagcctggccaacatggtgaaaccccatccctactaaaaatacaaaaattatctgggcatggtggtgtgcacctgtaatctcagctacttgggaggctgaggcacgagaatagtttgaaccggggaggcagaggttgcagtgagctgagatcacgccactgtactccagcctggatgatggagtgagactctgtctcaaaaataagtaagtaagtaaataaataaataagtgatgatatatctctgtggtggggaaccagggcttcaaataaaaataaagtcacaaatgaattgcaatcaagaaaaactcatgagaaaaaaggtaaccatgtgagtgatggatgtgttagctaatttgattgtggtgatcattccacagtatatatgtatatcaagtcatcctattgtacaccttaaatatatacaattttctttatcaattacaccttaataaagctaaaaaatgttaagctcatgaaaatatgtatcttaaaaacagacaacccaagactggctgtgagatggaaatcgttgaattgggtgatgggtgcatcagggattttattctcctatttccttttgtgcatattaaaaggttaaaaaaaaaaagaagcaagcaacaaaacagcacatcaagaatgacactattttatggctgggtgcagtggctcatgcctgaattcccagcacttttgcaggctgaggccagttgattgcttgaggtcaggagttcaagaccagcctggccaacatggtgaaatcccattctactaatacacaaaaattagctggtcatggtggcaggcacctttaatcccagctactaggaaggctgaggcaggagaattgcttgaacccaggaggcagaggttgcagtgacctagatcatgccactgcattccagcctgggcaatagaatgagactccatctcaaaaaaaaaaaaagaaaaaaaaaaaaagaatgacattaatgacattctagaaactactactggtttgtctaatattgactctcagtttttgaaaagtttacaagtatttactctaattatgtattaatgtttttggcctactgtttcattcatttagtacgttttaatgaatagaaattcttgagctcagtgtaagtgaatttattgttattattattatttttgagatggagtcttgctcttttgcccaggctggagtgcagtggcttgctctcagctaactgcaacctctgtcccccgggttcaagcgattctccttcctcagcctcacaagtagctgggattacaggcatgcaccaccacgcctggctaattttttttagtagaaacagggtttcaccatgttggccaggctgatctcgaactcctgacctcaagtgatccgcctgccttagcctccaaaagtgctaggattacaggatgagccacctcatcctgcccacaatgttaatttcatcatccattatattatcgcttgttactctttgtcatttttatcaaacctcaatttgacttgtttttatattatttaatattttctacattaaactatgtgtttcctgtaaaaaagaatgacactattttgacaatatttcataatattaaagagtggaaagatagaataatcataattatagcaattactaccgtagtttttcttctttcttaaaagtttgagtcgtttagcttctgagggatcctagtcctaggtgcattacatgcactttcattatctctattaaaatttttttttgagacaggctctcactctgttgtccaggctggagtgcagtggtgcaatctcagctcactgcagcctcgaactcctgggctcaagcgatcctcccacctcagcctcctaagtagctgggacctcatttgcacaccaccatgtccagctaatattatcctcattttattgacaggagaatgaagcccaatgaggtgagggcactggtctcagatcaaacagttaggacgtggcaaaatcaggagagatgagatttacttgcaatctggaaaatggtttaattttgaaccaaagtatccagattccagttttccaagaagaataggcactgactttttcaaagcctgctgtgtgtgtgttttttttttttttttttttaatttaagatggagtcttgctctgtcacccaggctggagtgcagtgatgtgatctcggctcactgcaacctctgcctccccagttcaagtgattctcccacctcagcctctggagtagctgggattacagtcatgagctaccacgccccgctaatttctgtatttttagtaaagattaagtttcaccatgttgcccaggctgatctcaaactactggcctcaagtgatccacccaccttggcctcccaaagtgctgggattataggtgtaagccaccatgcccagcccaaaacctgttttttttttttttttaatgagacaggttcttgttctgtcatccaggttggagtggcaatggcatgatcatagttcactgcaccctcaaactcctggactcaagccatcctctccctcagcctcccaagtagctgagaccacaggtacaagccactgcacctggcaaattttaaattttttttaaagagatgggggtcttgctatgttgcccaggccagtcttgagctcctgggctgaattaaccctcccgcctcagcctcccaaagtgctgggaatacagtcgtgagccatcatgcctggtcctcaaactacatttaagtgaaaattccagacctgggattggaaactattggcaatcttctgaataaacaactttattgaggtataattgatgtctaaccaactgcacatattaaagtgtacaatctggtgagttttgttgggtgcacacacctctgaaatcaacaccacaatcaaggcaggaagatttccatcacccctaatagtttccccagattttctcatgcctctgccacccctccctcctgcccctccctgtcactctagataagtttgcgttttctagaatttatataaatttttgtaatttacataaagggactcatgtggtgtattcaattttttttttctaattgcctaacccagatcccagctgctaaccagtccccagggtgtatcagtcctcattattgtcttacctacactatcgttttggattttcaggactttttgttctggatctttcaaggcagtttctagaactttcgattccacatcccggagaatagtggtagctgtggatgagatttcttgtctcccttctgttctccataaagtctgattggtgagaagtgactcaaatttgtccacaatcttttgcagctttgaagacataaagaattttcattttttaaaaatgtaatctggtaagtcccatatccaaaagaacagtagaaagcatgagaaagcaggctctggagctggaggaaccacgttcaaatcctggcacttcatcatgtcccagctttgtgaccttgggcaagtcactcaatcactctgtgccccacgacaggaaaaggaactcaaagggtttttctggaggattaaatgagttaacagatgctcttcttttaggacagtgtctgtatctggtaaaagctatgtaagggtgagtcactattattatttttgagacagagtattgctctgtcgcccaggctagagtgcagtggtgggatcttggctcactgcaacctccagctcctgggttcaagtgattctcatgcttcagtctcctgagtagctgggattacaggtgcacaccgccatgcttgcttaatttttttaatttttttttttgtatagacagggtcttgctatgttgcccaggctggtctggaactcctgggctcaaacgattctcctgccttggccttccaaagtgatgggattataggagtgagccaccgtgcctgattgggttagttattattaacgttttttgccaacaaggtagtgataagtttgttagaaatagaccagtggttctcaacgggggggtgattctgctactccctccacagggcacatgtggcgatggctggagacattttcggttgtcactgtcgcaacaagggagtggttgccactattgaagcagcgtcactgtctggggtaaatacccagagtttgtcatcttgcgccaagatgaaggacatggacacacacgaggagtgagtttaggagtggaggtttaataggcaaaagaaaaagaaaagagggcagggtgcggtggctcatgcctgtaatcccagaactttggaaggccgaggggggtggatcatctgaggtcaggagttcaagaccagtctgaccaacatggtgaaaccccatctctactgaaaatacaaaattagccgggcatggtggcgcgtgcctgtaatcccagctagttgggatgctgaggcaggagaatcgcttgaacctggaaggcagaggaggcagatgttgtagtgagccgagatcacatcactgcactccagcctgggtgacagagtgagactccatctcaaaaaaaaaaaaaaaagaaaagaaaaaaaaaaaagaaagtagaacagctctctcccttgcgagagagagggatgcccgaaagaaagcaaaatcctgcccaccgactagattttatattcaggcactagattttatagtcaggctgaggaggcggtgtctgaattatgtagggcccacagattggttgggccaggtgcgacatttacttactgctcggggaaggctggttgccctacccacttggccagtaccatcttgtctgctccttactgtacacgtgactggcaaagagaagggaagatggagctgccattttgatcatgtctagtcccaggcagccttttcctattggcacagctgctggcattgacccataagcttccagcttgcttgtctatgtccgcagcttgattttacaggctgctctttgttagaaaagaaaatttggggctgctcttcattaaaaggaaaacctcactgaggacttccgtaccctcaccatctgcctaagtaatttcttcttaactcctatatcattgtgtatttatttatttatttttgagatggagtcttactctgttgcccaggctggagtgcagtgacgtgatctcagctcactgcaacctctgcctcctgggttcaagtgattctcctgcttcagcctcctgagtagctgggattacaggcatgcgcccccatgcccggctaatttttgtgttttttgtagacatgggggtttcatcatgttggccaggctggtcttgaacttctgacctcgggtgatccacccacctcccaaagtgctgggattacaggcattagccgccatgcccggcctgattacttgattctttatttgttcattacttcagtgatcattccttgaactcctaatttggggttggtcttattcccttcctcaaaaagctcacagtctagggattgattacatgatgtaatcacatatttatataaatgccgtcagttggccggagacaataatggataccattggatacttggatgtcttttgcagcagtgcagcaggccttaatatactctctcttggcctgtctttcttggtctgggatagattcctgtctttagatggcaacacacacacgctcatacacacacactcacacactgtcatatgtatgtacgtacatgcacactgtgtgtgtctatctatacctatatctatatatatatataagtagatacagatacagagccctcttggtatacgcatggcattggttccaggatcgtccatatatgctcaaatccaatccatgcatactcaagacccatggaactcactcatgaaaagtcagtccttcctctttgtgagttttgcatcctgcctatatatacatatatatatatatatttttttgtttgtttgtttgttttgttttgttttttgagacggagtcttgctctgtcacccaggctggagtgcagtggcaacatctccactcaccgcaacctccgcctcctggattcaagtgattctcctgcctcagcctctggggttgctgggattgcaggcatgtgccatcatacctggctaatttttgtattttttagtagagatgaagtttcaccatgttggccaggctggtctcgaactcctgacctcaagtaacatgcctacctcggcctcccaaagtgctgggattacaggcgtgagccaccacgccaagcccggcaatactgtagttttgattcacatttggttgaaaaatgtcctcgtgtaagtggatccccgcagttcaaatgtgtgttgttcaactgtatatatagtgatatatctatagtgagctggataatgatacatatatagtggtatacctaatggtatatctgtatctatctatctatagatatatgtatacataccacaattatgcataatatataattgtatataatatatgaatatgtactattgtgtagtaatatgatattatatggtaataatatattatgtatttatatataacatattctttgtcctaaataatacattatatatgtatatataatatatattttgccctaaatccatccccatttgctcactttgggctttgtaaatatttgttactgatgtttgttacctgggaagggtctggggatcagcctccactcacctctttcctgccctcggttgtctttgaggaggtggtgtctgcaaaagacatcatgatggagttactattggaactgagagtgaccaggcagaggggtgggcaggtggggtaagtaatggggtgagcaactttgcacctagaaggtaaaagcctgaattcatagtctttatctgctgtttgttgatttttaaaaaattttaaattttatttaaaaaattttttattttttatttttattttgagacagagtctcactctgttgcccaggctggagtgcaatggtgcgacctaggctcactgcaaccttcacctcctgggttcaagtgattctcctgcctcagcctcctgagtagctgggattacaggcacgcacctccaggcatggctaatttttgtatttttagtagagatggggtttcaccacgttggccaggctgatctcaaactcttgacctcatgatccgcctgcctcggcctcccaaagggctgggattacaggcatgagccatcgcacctggctttttttttccctttttttttttagatagggtctcattctgctgcctaggctggagtgcagtggcacaatcttggctcactgcaatctcaatgtcctgggctcaagcaatcctccacctcagtcccccaagtagctgggactgtaggtgtgtaccaccagacctggctaaattttttttttttgtattttttgtagagatggggtttcgccatgttggccaggctgatctcaaattcctgacctcaggcaatccacccgccttggcctcctaaaatgcaaggattacaggcgcgagccaccgtgcctggcctccaaattcttttattccatcttgactggaaattagaactgaaatgtccgagaaaacagaaaattagaagcctcttgtgtttaaagtcagcctggctgggaatgataaccgaaacagaagcatcagtgtctggtcatcagctgttaatgaagacttttgtgttggtttctgtgcttagtgaggacatctctgctttagaaatttgaggaagggtgcacctgtagtcccagctgcttgggaggctgaggcaggaggatcatatgagcctaggcattcgagaccagcctggccaacatggcaaaaccctgtctctactaaaaatacaaaaattagctgggcatgttggcgggtgcctgtaatcccagctactcgggaggctgaggcaggagaatctcttgaacctaggaggcaaaggttgcagtgagctgaaatgacaccactgcactccagcctgggagacagagcgagactctgcctctgaaaaaaaaaaaaaaaaaaaaaaaaaagacaaggaaagtctagcaaatgtttacatatcttttatcatcatgctgaggttaaatctgtacttattctaaattttggttttcagctcagtctatttgcttaaaagcacaaacagctttgttttaatactgaacattttatcttaagagttcaagaactttgacttacaaccctgagtctagaatatgtttgttataggaaaccgtatttattgtagaaaactgcccttttgaaccaaagctgcacactttatcattgggtgggggtgtctgttgcttagagctgccagccttggtaataacgaaccccaaatgggctcagtctttataaaaggacggtgcagacctcttaacattaggaaaacaaccaaaggcattttccttttttgtaaaataagacaagtttaagagattaacatcagaacccaggtagaatcacagtctgcttctacactgtcaatagaggtgcgcattgcttagtaaaagacagatttatggctgagtgctgtggcttatgcctataatcccagcactttgggaggccaaggcagaaggatcgcttgagaccaggagtttgagatcagcctgggcgacatagtgagaaccccatctctacaaaaaatgaataaattagccaggtatggtggctcatacctataatctcagccactcaggaggctgaggtgggaggattgagcctggaagttcaaggctgcagtgtgcaatgattgtgccactgtactccagcctgggtgacagagtgagaccccatctcttaaaaaaaaaaaaagtttctctcttattatccctacggtagtcaatacctcatgggtggtctaccaagtctcatctcttttctcatatagactttcccatccatgttttccatgggagtggtcatgtttacatgacacagtatctctccctggacacggatccacgggtgcacatggggctcaaactgggccaatgtattcattcccaaagaatttgcaatggggtctcagagagagagtcaactgatctctctttggttggttggggcaaaaaaaatggtaagatctggagcgggttggtggtcatatttccttttttttttttttttttttttgagacagagtttcactctgtcacccaggctggggtgcagtggcgggatcttgtctcactgccacctctgcttcccaggatcaagcaattcttgtgcttcaccctcctgagaagctgggattacaggcacccgccaccacacccagctaatttttgtatttttagtagaaatggggtttcgccatgttggccatgctggtcttgaactcccggtctcgagtgatctacccgccttggcctcccaaagtattgggattacaggcgtgagccacccctcccagccggtggtcatattttctgtcctgtggtctaggaagcagagaaagccagcctgcagtgaaagagaaggaaggagcagatccaaagatgattagagacagggactaggagatgcaccctgggggtgttgagttcccagttttagttaattccagaagcccagctgcattcctgtccttgcagggcatggctacgcatcgttttcataaacccattttttggcctgttagcctgagtgagtttctcttccttgcaattcaaagaatgtggtctcaatcaccaccttgtcacatcctccatctccaaactatagttccctttctcacccccttatttccctcaacttgaacttccttctttccttgtagttccctgcagaaaataaaaaccacatcctggtcccacaacaaatacgtcttttctgatgttagattcaataaaaaatgaggaaggactgccgcctgtaaaaagtcccagcactttgggaggatgaggagcgtggatcaagaaaaattagctgggcgtcgtggtgcacgtctgtaatctcagctacttgggaggctgagacaggagaatcgcttgagcccgggaggcggaggtttcagccactgcactccagcctgggctacagagcgagactctgtctcaaaacaaaacaaaacaaaacaaacaaacaaaaaaacaacaacagaggaaggaaggcaggaggacaaaaatgttcttaccctgacaggtgttctcattggaattactgaattgttcattcccagaatgcagtctatatcctgggacacattgacagtagaaacttccttcgacattgtaacacacagcgttaaatccacaatatacactatagggtggtgtacattcattaatgtctggaacacaaagaagcaattgggtcattcattcagcaaagatttattgagcagctactatgtgtcaggagttgtgctctttcccccatggtctgtcctggctttccgagacaaatcagtttaggtaatggttatcttggtttttcgctttcttcattgactttggtggggttctccaggaagcagacaatgagacgagaatataagtactttatttgggaggggatcccaggaaacactgagagggcagtcgcgaaatgaaacaagaaactatcttttctttttgagacggagtcttgctctgtcatccatgctggagtgcaatggcaggatctgggttcactgcaacttctgcctcctgagttcaagcgattctcctgcctcagcctcccgagtaactgggattgcaggcatgcaccaccacgcccggctgatttttgtatttttagtagacacggggtttcactatgttggccaggctggtctcaaactcctgacctcaggtgatccacctgccttggcttcccaaagaactgggattacaggcgcgagccaccatgcctggctgaaacaagaaactatcttaaatgaacggccaagtttccaaaacagcccccattttgcctcccttttgctcctgcttctggataacttgcaaattatccctggccaggtgcagggttcacgcctgtaatcccagcactttgggaggccgaggcgggaggattgcttgagctcaggagtttgagaccagccgggacaatatagtaacaatccatctctacaaaaaaaaaaaaaaaaaaaaaaaaattagctgggcatggtggcacgcctgtagttgcagccacttgagaggcttgatcccaggagttggaggctgcagtgagtgtttttatttattttgatcagagtctcgatctgttgcccaggctggagtgcagtggtgcaatctcggctcactgcaacctctgcctcccaggttcaagctattctcatgcctcagcctcttgagtagctgagattataagcgccccacaccatgcccggcaaatttttgtatttttagtagagatggggttttgtcatgttggccagactggtctcgaactcctgacctcaagtgatctgcccacctaggcctccccaagtgctgggattacaggcttgagcaactgtgtccagcttgcggtgagctttgatcatgccacagcagtccagcctgggcaacagagcaagaccctgtctctaataataatgataataaaataataataataaaaaataataatacttctttaccgttacatgtctccaaggggaatgtgaatagtttctgcccagatccagaagtatatccatggttgcaggtgcagtgagtgttattgacacaggaagcatttggggggcacttagcacaggaagctgcagggagaagagaggcaggttaaatggactggggtcacaaactctcctgttataattaggccctgcctcttgatcacctgaggtcaggagttcaagagcagcctggccaacatactgaaaccccatttctactaaaaataccaaaaatagccaggcgtggtggtgcatgcctataatcctagctactcaggaggctgaggcaggagaattgtttgaacctgtgaggcggagattgcagtgagccgagattgtgccactgcactccagcctgggtgacagagggagactccatttcaaaacaaatatatatatttgttacataggtatacacgtgccacgttggtttgctgcacccatttacattaggtatttctcctaatgctatccctcccccagccccccactcccctgacatattatatatgtaaataataataataatgaggcctcgcctctgggcagggcctctcaaggctgaggaagcctgtgccttttcctcttgtgagatctaagcacgttaaaaaattagagtggccaggcgtggtggctcactccgcctggtgaggattttcacatggtgaaaccccgtctctactaaaaaatacaaaaattagccgggtgtggtggcaggtgcctgtaattccagcactttgggaggctgaggcgggtggatcacctgaggtcaggagtttgagaccagcctgaccaacatggtgaaaccccatctctactgaaaatacaaaattagccaggcgtagtggcacatgcctgtaatcccagctactcagggggctgaggcaggagaatggcttgaatccgggaggtggaggttgcagtgagccgagatcgcgccattgtgatcgcaccacggtgagaggcatggtgagcacgcctgttgacatctgtaattccagtgctttgggaggcccaggtaggaggattccttgaggctaggagttggagagcagcctgggtaacatagcaagacactattgctataaaaaataatttaaaaattagccagtcatggtggcatgtgcctgtagtcccagctactctggaggctgaagcgggaggattgcttgagcccaggagtttgaggctgcagtgagtcgtggtcatgtcattacactgcagcctcggcgacagagtgaggctctgtctctaaaacaaaaggacaaaaaaatttgaatttgtatggtaccatgggagggagattctgatcgtggtatatgttaaggtattttttctttaggcttcattacttatgaaaatgataaattcacagaattgaaaaaaaatccaacaataagtctcttattaccccagattctgagctgtctactgcttattgtatacttttcagaaaaataccaatccatatacacacatatgtgcatcatttttctttacgttataggaacatattacacatactgctctgttctttggttttcatgtaaaattttgcctgagaattttttccacagcttcacatgtggagcaacctcattttttttttttttttttttttttttgagacagagtctcgctctgttgcccaggccggagtgcagtggtgtgatatcggctcactgcaagctccgcctcctgggttcatgccattctcctgcctcagcctcctgagtagctgggactagaggtgcccgccaccacgcccggctaatttttgtatttttagtagaggcgggggtttcacggtgttagccaggttggtcttgatctcctgacctcgtgatccgcctgcctcggcctctcaaagtgctgggattacaggcgtgagctactgcgcccagctgcaacctcattattttaaaaggcattgcagtattccatcccggggatggacagtcccaaatatgctactgaaacaagggtgcaattgaccgtgcacgcaagtcttaatgcattttggattttgttttattttactttattttttaagagataaggtctcgctctattgtccaggctggcatgcagtggcagatcatagctcactgcagcctcaacctcctgggctcaagcgatcctcctacctcagccttctgagtagttgagattacaggcatctgccaaaatgcccagctaattaaaaaaatttttttgtagagatggggttcttgctatgttgcctaggctgttctctaactcctgggctcaagtgatccacctgccctggcctcccaaagcactgggattacaggtgttagccaccatgcctagcctttggaattttatttttggataaaaataaaataatatgttacataatttgtatattataatataatatacaacataatatataattatataagatataaattatatatttatacacatatatattgcatatacacacatatgtgtatatatatatatatatatatatatatatatatatatatatagtgttttctttatccacgtgttgattgatgggcatttgaactggttccatatttttgcaattgtgatttgtactgctataaacatgcttgtgcaagtatgttttttgtacaatgcttcttttcctctggatagatacccagtagtgggattcccggatcaaatggtagagctacttttagttctttaaggaatttccacaatgttttccacagtggttgtactagttttaattcccaccaatagtgtaaagtgttcccttttcactacatcaaagccaacatctattatttttttattatggccattcttgcaggagtaaggtggtattgcattgtgatttcgatttgcatttcccttataattagtgatgttgagcattttttcatgtttcttggcctatttttttttttttttaaagacagagtctcgctctgtcgcccaggctggagtgcagaggtgtgatctcagctcactgcagcctccacctcctgggttcaagtgattctcctgtctcagcctcccgagtagctagggttacagatgcacaccatcacacctggataatttttgtatttttggtagagatggggtttcaccatgttggccaagctggtctcaagctcctgacttcaagtgatccacctgcctcggcctccccgagtgctgggattacaggcgtgagccaccgtgcctggcctgttggccatttgtatatagaagaggtggtattgtactcagtggagcaaaatagtcacccactaagtatgcacaattctcctggggggacagggagaggtggtaccctctgccactcatttctttcctatctcttcccttcctgttcaggttctgcttagttcagagtgagctctgaaagtctattcttaatcttttccaggacttaataccttaccatactgagtatactggtttaaatagtgtcctcctaaaattcatgtccacccagaacctcaggatatgacttcatttggaaacagggtctgtacagatgtaatcaagttaagatgaggtcgtactggagtagggtgggcgcaggttgtcccttcatgtagtgtcagggtgtgggctagtttggtcttccttccaacatggtgacctcagtcaggctgcttatggcctccagaactctgggaatgggacttgctgttgtctgggggaggcttggcagagaggaaatgtggctgctggtggctatgaagtgagacttggagcagacggaaattttttggagtgaaatgtggcatgccctgtaatgcaaatacccttccatccttcctgtgaatgggccagtaaaatctaccttgctcatgaatgtcttcttttccatgaatgtcttcttttctgttttttttttttttaaatttggtaacatgcacataatatgaaatttaccatcttagtgcagcactattcacaatagcaaagacttggaaacaacccaaatgtccatcagtgatagactggattaagaaaatgtggcatgtatacaccagggaatactatgcagccataaaaaatgatgagttcatgtcctttgcagggacatagatgaagctggaaaccatcattctcagcaaactatcagaaggacagaaaaccaaacaccgcatgttctcactcatagttgggagttgaacaacgagaacatttggacacagggtggggaacatcacacccagggggtggggggcgtggggagggatagcattaggagaaatacttaatgtaaatgtcgagttgatgggtgcagcaaacaaatatggcacatgtatacctatgtaacaaacctgcacgttgtgcacatgtaccctagaacttaaagtataataaaaaaaataaatttacgatcttagccattactaggtgtacagttcggtggaatttaataccttcataatgttgtggaaccatctccataactgttttcatcttgtaaaactgaaactctgtacccactaaacactcactccaggctgggcatggtggctcatgcctgtaatcccagcaatttgggaggttgaggtgggcagactgtttgaggccaggagttggagaccagcctgggtgtcatggtgaaacccagtctctacaaaaaatgcaaaaattagcccacagtggcacgtgtctttagtcccagctactcgggaggctgaggcatgagattcgtttgaacccaggacgtggaggttgcagtgagccgagatggcaccactgcactccagcctgggtgacagagtgagactctgtctcaaaaaaagaagaagaagaaaaaaagagactctcaggttccaccctagacctgagcccctcccagattcttaacccacagaaaccaagagtgataaccagacaaactttttttttttctcttagattcaagaggtacttgtgaatctagagagagagtcccaggggaataacgttaaacagaaatgaccttgttcattattggttgacttgtttataatcagaatgataatgattagcattcctttgtctctccccactagaatgtctgcttcatgagactttgtgtgttttattttctgttctatctccactttgtactcactgtggttagcaaaaacagacaaattaaaaatcaaacaaaacgataaataaaaggctatccatatttgatataatgataaattaagcaaacaaataatgaaacacaggagcaagccttcccaaatattgctctcagaacaggcacttttctccagcccactggagaccatgagtggctccaggtccagcccttggtccacaagttctctgttctggctctgagcactcacttttggttttctgagtcacagctccaaagaggctcagcagaaagcagaggcctggaatagatgggaaacagaagggagagacatgaaacaattgaggagagattccaagaaatgccccaaggactgtgtatcagttatctatcactgtgtaacaaattacaaaaatgtagtggcttaaagctacatttttgttgagtatggagatctctcaaataactaaaaataggaccactgttggacccagcaatcccactactggatatctacccaaaggaaaagaaatcattatataaaaaagacacctgcactcatacatttacagcagcattattcacaataggcaagtcacggagccaacctaagtgtccaccaacagttgactagataaagaaaatatgccatatatgcaccatggaatactatgcagccataagaaagaatgaaatcatgcccttagcagcaacatggatggagctggaggacattatcctaagtgaactcactcagaagcagaaaatcaaatattgtatgttctcacttatatgtgggagctaagcagtgggcagacctggacatgaagatggagacaatagactctggggactttgcaatagccatgacttggctattgtgaatagtgctgccatagacatatgagtgcaggtgtcgctttgatataatgattattattttttttctttttttgagacagagtctctttctgtcactcaggcgggagtgcagtggcgcgatcttggctcaccacaacctccacctcccaggttcaatcgattctcctgccttagcctcccgagtagcttggattacaggcactcactaccacacctggctaatttttgtacttttagtagagaggtgggtttcaccatgttggctaggctggtcttgaacccctgacctcaagtgatccacccacctcagcctcccaaagtgccgggattacgggcatgagccactctgcccagcccaatgactattattatttttttgggtagatacccagtagcgggatttctgggtccaacagtagttctatctttagttctttaagagatctccaaactcaacaaaaatgttgttttaagccactaaaaaaggggaggatgtggggtggtgagggttgaaaaattacctattcggtacaatgtttaatgtttgggtgatgggtacatcagaaacccagtctccaccattatgcatgtaatatccatataacatacaagcacatgtacatcttgaatctaagaaaaaaaatgtttgttttgttatcactcttggtttctgtgggtcaagaatctgggaagggctcagctgggcggttctagcttgatggtctcatatgattatagtcagttagtggatggggctgcaacggctgagaactagctgggcattgtcccttcacctgttgtctcagggtgttgggcttgtttgggcttccttcaaacatggagacctgaagcaagctgctttaatggaacatctaagctctaagcatgagtgtcccagctgatgaggctgcatttcctcttgacactcatccctgaaagtcacctggctctacttccatcatattcccttggttacaagcaagttacaagctcattcagattcaagtggagaagaatcaaattcttcctccttatgagagaccagcaaggttctagaaacacatttttgatgggggatattatttccacctttttggaaaattgtctgctcaggctggctctattgtggctggtaaagagccctttgctcttccccatgcctttccaacatccgatgatgtcatcagtcatgttcctgcttctgcaaagacctaaagatgctggacagatggactgctttttttctgtcacttcagctttgcaacgactttagcaggaaagtgctattagcatcatctctgcttttcagattaagaaatggaggcacagagaaggtaagtaacttgctccattcactggggctagtcagtggcagagctgaggttaaacacgggttctgggttctagctgataacccattacaccacatagcctctccttcagaaatcccacagggcactacctgcatggaagtgctgttcagattgtagacactgtaggttggcatgtttattgtgacagtgacttgtccttttttcccccggcagatgccactcaccagatctgactggagcctcaaagtcccgtagagagtggtatgtgacttggtcatttagggcagtgcagaccaattgtaggattttggagaagaggccctgggggctaactgtgtgactcttcaggagaggtaatggcagcaatctaaatccttctggatctctctcttgagtttccaattgctgctatcacaaattaccatgactgtagtggcttaaaacaacactgatttattattctcttacaggtctggaagtcagaagtcttaaatcagcctctataggctaaaatcaagaatgttagtagggctggtttcttttggaagctctaggggagaatctgtctccttgccttttccagcttctagaagctgcctgcatttcttggctcacggacccttcctccttctttaaatccagcagcacagcatcttctcgtcttcctgatcttccacctccctcttaagaggacctttgtgattattatattaggccccctggaaaattcagggtactacccccatattaagattcttatcttaatcaacatctgcaaagtttcttttaccatgtaaggtaacatattaacaggttccagggattaggatgtggatgtctctggggggactgttatttttcttcctgtaattctcacccttcccccaagaagatgccaggtctggtttgtgatcagttacttatgcaattgcattcacagaacattttgaatattctcagctgggcttaatgtcaggctgatgtttcctttaaagtccccttccttctacattttttatttttatttttatttttttgaggcaggttctttttctgttgccccggttggagtgcagtggtgcaatcatacctcactgtagccttgaactcctgggctacatgcatgagataccacttgtggccaattaaaaaaaatttttttggtagagattgggtcttgctgtgttgaccgagctggtcttgaactgttggcctcaagtgatcctccttctgtggcctcccaaagtgttggcattatatgcgtgaggcactttcttcttttgtatatacatgaatgtgtagcagccacacaaaccttacgcctgcccaaatgatgactagctcacagggccaactgataaaccatatggctgaatagtgttaccctgttcctaaaactcaggcagtctgggggaccatcatgtttccttaagactagtctttagtctaaccagcaagcctgtactcactaatttgggcaaaggtcttaagttagggtttctgaagagtcatcggtgtgtcagaatcccagagttctaagaaactttagaaatcatccactgacttattttgtagatgaggaaacaggtcccctggggttaagtggctggcacactagttgggcaaatttgggtaagttgtttaacttctctaagcttccttatgtgaaatagggtggcagtatgacctactttgtggggttttggagatgacctaaatgagggactgtgtagagcacaatgtcaggcaggaagtcctccactgatactggctgcctctgtcaccatctgacttcctcctttcccatttggatgctttttctttctctctttttgcctaattgctctagcttgctgcctatattatcatttgagctctgttgctcaggctggagtgcagtgatgcaatcacagctcattgtaaccttgaactcctgagctcaagcgatcctcccacctcagcctccagggtagctgggactgcaggtgtgtgccaccatgactggctaatttttttttttaatgtttcttggagacagagtcttgctatgttgctcagtctggtcttgaactcctggctcaagcaatcttcccgccttgccttccaaagctttgggattataggtatgagcctccatgcccaaccctggaatcctaattcttgacccaatgctcatatcatcacccttgcctgtaccatccagtgatatgggctaaaagttcctggataaccaaaattcactaataatccacctcagaagtgtggaggactctgtctccagttgcaaaaaggcaggcttctttcacatttgattccacatatactgaaacacctcttatatataagatgctatgctaggggttgcaaaggtgagggagacatggcattaggatttaagtgtagcttgtattattttgatagaatttacagcctatcagctgcctctgcagcagaatagctgtgaggctttgagaaattcacagaacctctctatgatgcaatttcttatctgtaatgtgcagatgctatgtgacaatgtaaagcaatttaagcctaatgccaggctaaagtagctgcttaataaatgtaagctttgattgatattgggactatcaatattgttaattcatctggagctggaaagatggatgggatttcatccgtacagagatggtggttgaagccatggaattaggagattcccatagggagagggagtagaaaaacagaagatcccagtaaggatcctgtgggaggagcattatagcaaagatctggagacagatggtttggattcaaatcccagctctcttatttactagctgtgtgatgttggacaaataacataacctgtgccccagttttcttatctgtaagatgaggataccccatgagcatactgatgatgcaacagattaatacatgtaaggtgcatagtgagttttcaaaaatgttggttatcattattttctttgtataaatttatgggatacaagtgtaattttgttacacgcatagatttcatagtggtgaagtcagggcttttagagtatccaccatccaaatgatgtacattgtaaccattaggtaacttcttattttccactgtccttctactccctcagccttcccagtcttcatcgtctatcattctactctctatgtccatgtgtccacattatttagctcccactgataaacaagaacatgaggcatttgtcttttggtgtttgagttatttcacttaatataatgacctctaaaattaataataaaattatcatttattttcttgtcacaggaaaatgataaaggagggagaagaaagaatagcaagagaaaaaggaaaaaagtcagggcagggctagtttgcagaagttatcaagaaggagaagacatcaattagaaaacaaaacttgccaagaggaagatgaacaacgtattagagaccgggtgcggtggctcatgcctgtaatcctagcactttggcaggctgaggcgggtggatcacctgaggtcaggagttcgagaccagccagggcaacatggtgaaaccccatctctactaaaaatacaaaaattagccaggtgtggtgatgtgtgcctgtaatcccagctactcaggaggctgaggcaggagaatcacttgaacccgggaggcagaggtttcagtgagtcaagattgcgccactgcactccaacctgggtgacagagtgagattctgtctcaaaaaacaaaacaaaacaaacaaacaaaacaaacaaaaaaccaagctactagattggataggaacattttagggatattcgagagcatactttgaatagggtagtcaggaaggaaaccacactccaaagggaaaaggtgagagtgttcagagcagaagaaagaggaggagaaaataaccaattgttgaaccaagtggtccctgactgggggataggttaagcctcagtcattgttacagtcacacatacctggaagaagcaatggtccctgcatttctgtggtacgggtatcccacgccagccagccctggaagctctctactgtgccgtaagccaaccacctttcctagctcaagaaatcccatgagaattgaagtatgtatcttaggtcagctgactcatgaaattgctatcagaaaagcaaactgcttcccctctttcgccatcagactcatggttctgcttttcgtttatttgctgtaccttttctgcctagctattgttgatcacctttgggatgattgagttggtaaaccctaacgaggaaatgccctgaaagttacatcacattgtctgaggattaggaagtgcctttggggccaaaataaatcttaaataagcctgtggctttgaggtgagtaaaccagattttagggtgtctgtgttggtatctgaagtttccagaggagtcattttaacatatctttctcttcccccagtagatgatacttactggttatgattgctgagccataagaagttaagagtcccaaagtctcatagaaggtaatacattatttggttatttggaccaaccctaaccagtcacaggacttgggagaaaaagtctgtaaatctacccttcctccagcaaatatttatttatttatttatgtgggtcttgctctgttacccaggctggagtgccgtggcacaatcatagctcactgcaacctcaaactcctgggctccagcgatcctcccacctcagtcctctgaatcgttaggactacaggtgcatgccaccacgcctggctaattttttttagtttttatttttttttttgaagagagacagggcctcgctttgtagcccaggcttgtcttgaatttctgggctcaagcaatccttctgcctcagtctcccagtgttgagattaccggtgtgagccactgcacccggctcccctgcttaaaactcttctgaagctcttcattagacttaaaacaccagacttcctactgaagcagtgttgttgtctggggttcatcctctcatgccaagtaaatcaaggatgcggatgcacaagaagtgaatttaaggccgagcactgtggctcacccttgtaatcccagcactttgggaggctgagacgggcggatcacctgaggtcaggagttcaagaccagccaagccaacatggtgaaaccctgtctgtactaaaaatacaaaaattagctgggcatggtggcgcatgcctgtaatcccagctactcggaaggctgaagcgggagaattgtttgaacccgggaggcagaggttgccgtgagcgaagattgcgccagttccttccagcctgggtgacagagtgagacttcatctaaaaaaaaaaaaaaaaaagtgagtttcagagcagaagtttaacaggcaagagaagagaaaaaagagaaaagctctatcctgcagagagagaggggctcccaagtgagtcttctggtctcgtggtgaaatacatggggttttatagccgagcttgaggaggagctgtctgatttacacaggaaccgagagattggtcggactgggtgtgctgtttgcatagcacgcaaagaagctggccgccccatcctcatcttttactatgcagatggggtctctacctggctggcactatgttgcctgcttttttactgcacacgtggtgataaagaaaagggaacatggtgaaaccccgtctctactaaaaatacaaaaaattagccgggcgcggtggcgggcgcctgtagtcccagctactcgggaggctgaggcaggagaatggcgtgaacccggaaggcggggcttgcagtgacccgagatagcgccactgcagtctggcctgggcgaaagagcgagactctgtctcaaaaaaaaaaaaaaaaaaaaaaaagggaagagggaacctccatgttgaacatgcctgcccccaggaagccttttcctattggcacagccgctgcatttacctttgcaaacttccagcttgcttatttatgtttgtagctcgattttgcagactgctctttgtcgtggtggtgatgatgatgatggtgataataacggttgtggtggtgatggtggtaatcatggtagtggcaggagtgatggtggagctataggtggtggtggtgacgatgaaggaagggatgatggtgatgatgacgatggttgcgatgatggtgaagatgatgaaagtgacggtgatggtagtagcgatggtgatggttacattatggtgatattttcagagatggtggtgatgatggtgattgaaggtgacagctgcagtgaaggtgattgttgtggtgatggtgacgaaggctgtgatagcagtggtgataatgatggggtgaaaatagcaaaggtggtggttatattggtagtggaggtaaagacgaaaagaaatgattttggggctgctttttgttaacagggaagccttactgaggactctcttaccctcaccagttgcctgaataatatctttttagctcttgtatcactagatacaacaggaacaaaaaggaacaaacaaacaggcaaacaaacaaaaaaaccactgcaagaaagtagccctggtggcaactgaagacacggtcatggattaaatcatttagggagagattatagagtggaaaaagaaccctgagtaattcatttaaaaactcaggcaatgttaatttgtgcaaaggcaatagaaaaaaattaaaaaaaataaaggaatggagaggcagctaatagaggagacaggacgagaatggccagagagatgaggggtgggggtgggaaatgaatggagtatggtattatggaggtaaaggaaagagatcacactgaattaagactgaaagacacccacaggagagagctgcaagggggttgtttgtattcttagcatgaacaattacagtagtgaaggtggtggtggtggtgatgatgctgatgctgatgatagcggttgtggtggtggttgttatatataaagtttcggtgacgtgaaagaaatagcacttgaatataaaattttccttttaattctcagcaaggcaagttacttcaatatagaagggtgtgcccttacagatggaacagtggcgagcgcacattcggacatgggaggggaaggggttcttatccctgactcaggtggcccctgctgctgtgtcgttcccctattggctaggattagaccgcgcaggctaaactaatgccgattggctaatttaaagagaatgacggggtgagtgctttggcgggagtcagggcagagcaggtagcaggtaatcggaatgagttagggtggagcaggtgatcagaatgagtcagggtggagtaggtaatcgaaaaagctgctttacgaggaagttaagtttaaaagtagaaggcaaagaattgaacatactgacatattaattctttgaaaataaatttagaactcatatctaacatggtgatgatgatgatgataataacggttgtggtggtgatgatgatggtgatagaatggttgcagtggtgatggtggtcatcatggtagtggcagtagcgatggtggtggtagaggtcgtggtggtgatgacggaagtgatgatggtggtgatgatgatggttgcgatggggctgaaggtgacgaaagtgacgacggtggtagtagcaatggtggtggtaacatcacagtgatgttttcagagatggtggtgatgatggtgattgatggtgacagttgtagtgaaggtgactgttgtgatggtgatgaaggctgtgatagcagtggtgatgaagatgggagtgaaaatagtggcggtggtggttatgttgatagtggaggtaaagatggtggtgatgccaataatggtagggaaggtggtggaggttgttgttataatggttcaagccagaattatgtggattgaggaaaaagcgcgaggggaagaagtggagacagcaagtgaagtcacctgtaaagacagttggagaaaaaagtatgagcaaagcaagatgatcaagagacctccctgggtgtttggagcatggtggaattagctggctattgggattgtcaaggccatgaacgtacgtagtaggtttgttgggctctcaacatcctactgtcccagcatgcatgcagtgaggcttcctgatctttctccctagtgatcgtctaggggtggggttgtagaggcaagagttgatcaagagagacaggtggtgctacctaatggtcaggccaaagtggttcacatagtttggatgttgttccctctaactctcatcttgaaatgtaatccccagtgttggaggtgcggcctggtgggaggtgattggattatgggggtggatttttgatggctggtttagtgccatttcctcggtgctgtcctcatgatagtgagtgagttctcatgagatctggttgtttaaaagtgtgtgactcctcccctcttctctcttgctcctgccctcaccatgagacacctactttcccttcaccttctgctatgattggaagcttcccaggccttcccagaaaccaagcagatgtcagcttcctgtaaagcctgcggaaccacgggccagttaaaacacttctttatcaattacccagccttggatattcctttgtaacaatgcaagaatggcttaactcagtagttatgctattacagaatgttggctgcagagtcagaatccctgggttcaaatcctggctctgccactgattagctgtgtgactttgggaaagttactcaacctctcttttctgcaggcatctctgatctgggataactgcaatagtctcgtaactcgttgtccttctgtcccatcctccaccgtgcagtcaggacagttttctgaaagatgattctgggcccatcacacctctgcctcacaaccctgtgaatatttcacaggctaaatgcacttacttagtaggtgcataaatctcaccccactctggtcccactccacttctccagcctcatttcctacccttctgcttcagcctttccaccttccctgatacattttctgtttccctaaactccacattctatttgtagcctttcatgcctttgtacatgtgattctctcaacctggaatgcccccccatttttttttttttttgagacaaagtctcactctgtcacccaggctggagtacagtgacatgatcttggctcactgcaatctccgctccccgggttcaagcaattctcctgccttagcctcctgagtaactgggactataggtacccgccaccatgcctggctaatttttgtatttttagtagagatggaatttcctcacgttggtcaggctggtctcaaactcctggtctcaagtgatctgcctgccttggcctcccaaagtgctgggattacaggtgtgacccactgtgccccacctggaatgccctttctttttctttcttgccactctactcctggccacgtccttcaagtggcattcttttgcatgtccttccatgataaactcttgtgaaaggaaaataaagtctcaggactccaattcaggaataaaattaagctgaaagcggagtcaagcagacagctacagataaaaggccagatatcttcacaggtagctactgtatattcattttatcttacataaagtgccgatttactgagcacaaggtgaatacatcattgactagtcccccacctgctccttttatctctggcaacacattggttcagtaatgtgaccaaactctccctctttcccctccagtctgcttttcccccttaaatattgaagccctcaaaattatctttggagaaacaaacagatgatagtatgtttttctgtgttcctttcttccaggcatgttcttgaccctagcaaaataagcttctaaattgattgagacctgtctcagttacttttggtttatactctccactgtgcccttccctgcctctaagatagagttagcttctctcatttctctgttcatatcctatttcatcaaatctaaagcattattaattttaaggtacaccattggccgggtgcggtggctcatgactgtaatcccagcactttgggaggctgaggtgggcggatcacttgaggccaggagtttgagaccagcctggccaacatggcgaaaccccatctctactaaaagtacaaaaaagtagccaggcgtggtggcacgcacctgtaatcccaactactcaggaggctgaggcagaaggatcgtttgaactcaggaggctgaggttgcagtgagccaagatggtgccactgtactccagcctgggtgacagagtgagactccacctcaaaaataaataaataaataaaggtacaccattattttatgtaccactacacctaaccattaaactatgatacaatgctttattattctttataaatttttattttattcttgaatgagctataatagatttatttagaaatgaatatttatcatgcatggctctgttgcatgcatacaaaagaaactagcagcgggaactaaatttgttaagatgttcttgaagcttcttcatattcagaatcttctaaattactttcagcacagtcattggtgcccatgtttcaatttccatgtttctctatgtcagtagttctcaagatgtggtccccagatcagttgcatcaatattgtctgggaatttgttagaaatgcagattcttgggcctggtgtggtggcttatgccggtagtcccagcactttgggaggtcaaggtgggcagatcacaaggtcgagagatcgagaccgtcctggccaacatggtgaaaccctgtctctactaaaaatacaaaaattaggcaggagtggtggtgggcacctgtaatcccagctactcaggaggctgaggcaggagaatcgcttgaacctgggaggtggaggttgcagtgagctgagatcacaccactacactccagcctggggacacagtgagacttcatctcaaacaaataaataaataaataaataatgcggattcttggaccatatccagacctgctgaatcagaaatgttgagatagagcccagtgagtgttttttaacagaccttccaagtaattctgatacatgcttaagtttgagaacccagctttgcatggtattgttctctggaccatcaggagtactgtgatgtaggatttattcaaagaacccatgagagagccagaggccattgctagttctctgccatcctaacattgcttagtggggcacctgagaataaatcaaatgttttccaactgtgatgacaaatgagattataattccttttcgtaaccaaattattgtggtataatattccaggggctttcttgctggaaatctaaaagtgtgttctcagttatctctgagagtttctcacaggttcacctcatagatgtccctgaatagccctttccatccttccatgcatccatccatgcatccatccatgcatctatccatttatccatccatccatccatcatcaatccatccatccatcatgcatccatgcatccatccatccatccactcacccagccatctacctttcatccgttcactcaccgacctattcttcttttcatccaccaacccatttatgcactcatccatccacttagtcacacactcaacttttcatcttgggtgatggaggttgggatgcttgtgattttggtgaggatagagattgagatgcaaattatttttggtgtgggatagaggctgggatgcacatggttttttagggggatagaggttggaatgcacatgatttttggggagttagaggttgggattcttgaggttttgggggatacaggttgggatgcatgtgatttttggggggatagagactgatatgcacatgcttttttggggggatagaggttgggatgcatgtgattttttgggggtagggtttgtaatgcacatgatttgttgggggtaagggttgggatgcacttgatttgtttgggggatgaggattagaatgcaccgaattggccaggctccgtggctcacacctgtaatcccagcactttgggaagccaaggtgggtggatcatgaggtcaggagttcaagaccagtttgggcaagatggcgaaaccctgtctctaataaaaatacaaaaaattagccaggcctggtggtgggcatctgtaatcccagctactcgggaggctgaggcaggagaatcacttgaacctgggaggcggaggttgtggtaaaccaagattgcgctgttgcactccagcctgggcaacacaagctccctcccccccgcaaaaaaaatagaatttaccgaattttgagtggagtgcagctttcataatgcacatgatttttgggtggggtttataatgcacaagatttgctggggggcagggtttaggatgcatttgatttgttggagggataagggttaaaatgtacatgattttttttttcttgggtgcagggagtgggatgcacatgatttttgaggcatagaggttgggatgcccatgactttgggggtaggggttataatgcatgtgatttcttacagaggggttactcctagaagaagagaactgaagaaggataggacagaggaaggagctgaacaaggaggtagtcttagcaagagtctagcctcagcctaatcccatggggagctctggactgtgcaccatggagttgatccatcttgaggcagggcccttatacaaggcccttatgtcaatcaatcattggctgtggctgccctgggcgtgggtgcaagccaaacctcacaggtaaatgaatgaatgcaaccatgaagagcaactgggtggagctccaggagcatcaactgcattgctcaaacctttatctgggtcatgctcacccactgcctcaaacgttgctacacagagtatgaatgtcacttcctcttcattttaaagtgttcaaaataacaattctcattagccgtgttgcaacatcacatgataaatatgggggtgagcagcttccacatgattctttttttcaatttctgttgttatttctcattgaaaaaataagaattgtatatattgatggggtactatgtaatgtgttgatatatgtatacatgtggaatgattttaccaagtgaattaacacattcattacttcacatacttatatattttgttgtagtgagaatattaaataagtaaatatatatatatatatatatatatattttttttttagagacagggtcttgctctgttgcccaggttggagtgcagtgatgtgatcatagctcactgcagcctcgaactcctgggatcaagcggtcctcttgctccagcctcctgagtagctgggactacaggggcatgccaccatgcctggcatatatatatatatatatatatatatatattggagatggggtcttgccatgttgcctaggctggtctccaactccagagctcaagccctcctcccacctcggcttcccaaagtgctgggaatacaggcatgagtgactgcgcctggccaaaatgtattttttaaaacaattttcaaatatacaatgaattattaactattggcaccttgctgggcaatagatcttgaaaactcattcctcctgtttaactggaacttcatattctttggtgcaagtaatgcttaattctttttttatattttgagacggagtctcactctgtcaccctggctggagtgcagtggtgcgattctcagctcactgcatcctctgcctcccagtttcaagcgcctctcctgcctcagcctcctgagtagctgggattacaggtgcccgctaccatgcccagctaatttttgtatttttaatagagacggggtttcaccatgttggccaggctggtctcgaactcctgacctctagtgatccacccacctcggcttcctaaagtgctgggattacaggtgtgagccatcgtgcctggcagtaatgtttaattctcgacaggctcaaagatgatcatggcagccagcttggtagtcaggttgaatttatttaagtgtcgatccctacagagaggatgctgttgatccctcacccagatcccgttttctggtttattttctagaactatttccatgagaaataaaatcaaattttattaatgtcaagaaagtatttctttgccctaaggaacaaatggattgttctgtagggactcatcccccagctgttgtatattagttgctatcagtcacggctgtctgatatatcaacctgaaataatcaaaagcaccagattccagttttaaagagcttattcaagagaaaatccatgaacagccactctgggatgcacaaactctagagaaatggagtcaatgctctgaagttagaagctaagttcttgcttgtataggaagacaaagaaatttaacaggattacattttctatacaaggctggtttatgagttataacaaattaattagttgcagttttttttctgtgtgatttgttttctttttgttgtagctgcttttcattttctttccaatttaaaagtgtgtatttaacattccctctaaaggcagtgtaatagccatgaagtccttatgtgagaaagggaaaagggaagttattttttactgaaagtcaacagcagagaaggaagggtcttccctggctcttcaaccacctgtaacattttacaaaacagtgccagtaaaggaaaaggtttaatctgtaatcagagaaacaaaagctatggcttcctgggtttgagctgcctgttacgtgactcgggccctgtaattcacattcctttaaggccctaaataatttaattgagttccaacagcttaattttctttttatttggagatggattctcactgtcacccaggctggagtgcagtggtgtgatcatggctcactgaagccttgaacccctggactcaaatcgatcctcccaccttagcctcctgagtagctgggacaacaggcatatgccactatgcctaattaaatttttttttttttttttgtagagacagagaccttggtacgtggcccaggctggcctacaactcctggcctcaagtgatcctcccacctaggcctcccaaaatgtcggtattacaggcatgaaccaactgtgtccagccccaatagcttaaattttgaatgactaattttatgcctccttcagataattgctgcctcagctgaacaggagttgctctgggaggttatgatcccccacccttaggaggcatcttgcagccaatggctatccaagatgggggtacaaaatgccagctcctttcctcaaagtagaatgggaccagttctgtgtctcatactccagagctccctatgagattaggttgaagcttgactccagctgagcccacatctttgttcaactccttcctttccttcctaccctgctttccttactccctctctcccaagagcaccccagcaaatcatgaggacctaccctcctcccagggattgcgacctaaccaaattcctcccttatttggttatgtcatcaacacaaaagaagaaataattcaagtttcctaacactttctggttttatcctgagatgagatttaaaaatataatgcttgatttacagtaagacacaaataagatccccattatcaatattactttattgatgatgatgataataatgatgattgagtcctatttcagagtgcttaatttctttttgaaattgagatagagtctttctatattgcccaggctggtcttgcacttctggcctcaagtgatcctcctgccttggcctcccaaagcactgggattacaggtgtgagccaccgcgcccagctcagagggcttagtctttacattatagtgccatcttctggtaagattaaagaaaaagaaatccaaagtagcttcaaatgctgggctttaagaagctgggttgaagtatggatgaaggtctaaattttccgggtatgaggagttaaggcaaatcctacagagatattaacttgttcttttttacatcaccttaaatctattattgtatctttattattctgggacattcaggcccaaagatactcattaagtcagtaagctaaatttagtgacaagtgcatgagaattagagttaggaagcctgatcatgatatttattcactcatgcatttgtgaacccatccatccatccgacaaacgtttaagatatgtggtctctgtgctcggtgatttcatgtcaggttgattcattttactcagtgtttactttctcacatttaaaatggggttaacaatggaaaacagcgtggcgattcctcaaagacctaaaaacagaaatactatttggcccagcaatctcgttactgagtatctacccaaagaaatataaatcattctatcataaagacacatgcgcatgtaagttcgttgcagcattactcacaatagcaaagatgcggaactaacctaaatgcccatcaatagcaggcgatataaagaaaatgtacatgcacaccatagaacactatgcagatgtaaaaaagaatcagctcatgttatttgcagggacatggatgcactggaggccattatccttagcaaactaacacaggaacagcagaccaaatactggatgttctcacttctttttttttgaaacggagtctagctctattgcccaggctggattgcaatggtgcgatctcggctcactgcaacatctgcttcccaggttcaagtgattctcctgcatcaccctcccgggtagctgggattacaggcgcctgccatcatgcccggctaatttttgtatttttaatagagacggggtttcaccatgttggccaggctggtcttgaactcctgacctcaggtgatccacctgcctcagcctcccaaagtgctgggattacaggcgtgagccaccatgcttggccactgactcctttcttactcctggctttgttgagttatagttgacaaataaaaattgtatatatttaaggtgtacaacttgatgttttgatatacatacagtgaaataatgaagcaattagcacatccatcgcctcacatatttgcttttttttttttggtggtaagaacacgtaagacctaccctcttagcacatttcaagtacataatatgttcctgttaactacagtcaccatgctgtacattagatctccaaaacttatttatctgaaataactgaacctttgtacattttgttttttaaatgatacatttcttttatttttatttttagagacagtgtcttgctatgtggcccaggctggtcatctggaactcctggactcaagcgatcctcctgccttggcctcccaaagtgtgctgtgattacatgcatgagccaccccgcccggcccaacttctttgtaagaacatttagcttaaaacacagataaattgtactgcataaaggtattttctttctttatatccttattctataagctatttttcatttttttttttgagatggagttttgctcttgttgcacaggctggagtgcaatggcaagaccttgggtcactgcaccctccacctcctgggttcaagcaattctcctgcctcagcctcccgaatagctgggattacaggcgcatgccaccatgcccagctaatttttgtattactagtagagactgggggtttcatcatgttggccaggctggtctcgaactcctgacctcaagtgatccaccagcgtcggcctccaaagtcttgggattgcaggcgtaagccaccgcgcccggtcttttcatatttttaaaacctttttaaatgtgagtaatgtgttgcactgcaacattgtgacagttacaacatcactaggtgataagaaattttcagctccattataaccttatgggatcacaactgtgtatgtgtttcgtggttgaccaaaaccttgttatgtggtgcatgactgcacatgtgcttgatatataaagaataccagggaactagtgacagtggttgtttcaggggaggaaaatttaggaatagagtgagcctcccgtttgaacttttcccataggtatgtactatgtatactacataataaatagtttttaaaaagtcagatctatgtcttagattcacacatcttatttttagtgagaagggcaagctgtagaagaaacaaaaatacatcgtcctatttttagaataaagacagttagttgacccgtgaacaccaagggtttgaactgtggctatccccttataggtagatttttttctacctttgtcctccttgggacagcaagacaaacccctccctttcctcagcctactcagggtgaagctgacgatgaagacgtttatttatgatctttacgatcacttccacgtaacgaagagtaaatatattttctcttcttcatgattttcttaataacactttcttttctctgagcttagtttattttaagaatatggcatataatatacaaaatatgtgttaactaactttatgttattggtaaagcttctggttaacagtagtctattagtaggtaggttttgggggagtcaaaagaagtgaattttccactgcacagggtggcgccccaactcccgttgcctaagggtcagccgtataaaaatatacaaaaacaatcttaagtatgggtatatttttgtaggggattggattaagcccatggataaaggtggaaggggttggggaaaaggaaggagaaaagggtaagttaaatattgagcatccctaaagagacccggggaggggtcgggtgtgcccctctcaacccttgaagcccaggtcccctcatcccgccttccgaatgcaagttcagctcccattcccaccccaagcacaagccccgccccatttttgcccctgaggcgcacgacccgcccctactaccaccctgcaaaccaaggccccgcccactccgccattggggtgcaagccccgcccatcagccatcggagggcaagccacactccaccccgcccccgcgcacaggccccgccccacttttgccccgggacctaagccccacccctatccctgtctctcggacataggctccgcccccagcaccaccctccatgctctgtgggaccccactccagagcctaacctcatcccccgggtaagaatactagaatttctccttggaggctaaagaagacgttagtttctctgccgccgcctaaggctaccctggccacaacagcctgagccacagccacttccgttcccggcggccccgagaccggaagcggaagtgcgcgcggcggcggccgacggcggctgagctgtgctgcgcggcgcggcgcggtgcggcacggcacggtgggagtgtctccggctggcttgcaggtgtggcccggcccctcgggagggcggggagggcggggagggctcggctggcgcggggagggactggagggcctagaacagctccgcctgtgtgaggggtttcctccctgcgatcagccggtggccggcgtgaggcccacacagtcagggcctcgcatctgggcgcccgccgcccggtctctcgctctcaggtaccccccgtccgggcagacagggctgtcatcctgtcaaaagggaaatcccaaacagtccaggtcccacagctcagaaatgtggtgacaccggccccagctctcacctgtccttcccaatttttagggaaagtgcataaagacggccctaccttgcctacagtatgcaagataactgcgaattagtaattcacgttttatttgatatgatacttaatattatctagctttgcaactggaaagtgaggtctgggtccacatgtgcaaactggtttaattgattggccaaatttacttaaaaaattgaatgcatcctccattaaggaatgaattagatgacgagagatttcttttggagactgacaatttgaagtcttttagcttaatatctgttagcttggctttgcatctcttccttttccataactttttctttcttcttttttttctttctcataagaaagcttttggccaggcttggtggctcactcctataatcccagcactttgggaggccgaggcgggtggatcacctgaggtcaggagtttgagaccagcctggccaacatggtgaaaccctgtctttactaaaaatacacaaattagccgagcgtagtggtgggcgcctgtaatcccaactactcgggaggctgaggcaggagaatcgcttgaaccccagaggcggaggttgcagtgagctgagattgtgccactgcactccagcctgggtgacagagcaagactccatctcaaaaacaaaaacaacaacaaaaggaggagttcttaattttttttgtttttgtttttctttattttctatgtttgagacgacttttacttctgctgtgggcatcaagtttctcactgttaggttaagaaaagccgtttctcagttatttcacaaatattattatcaagaaaacctaagactgttattcagatcttttcaagttggctccagtccttcccccaagcatgtgaatcacagagcttcaaaactaatggaacttcagggaaaagacgatataaactttgttaatactggaaattcaaattgagttggccataagtgggatgtcttttttaataatggggttaaagctcgtgtctactgagaaatcaggaaaaaattaactccagaggaaaatcatgcatcagatttcagttttacgagtgaggtgtttgtttccacaaagaatatatgcgcttgccttgcctttttaaaaagaattaatattgtttcttaaaggtacctgaaacttgtgtgattatgtcttatgaaagacaggcactttaagttattcttatatttgatttttatggtgtcatattgtcttttttttttttttttttgagacagagtctcacttcatcacccaggctggagtgcagtggcacaatctcggctcactgcagcttctgcctcctgggttcaagcaattctcgtgcctcagcttcccaggcagctgtgattataggcgcccgccaccatgcccggctaatttttgtatttttagtagagacggggtttcaccatgttggccaggctggtctggaactcctgacctcaggtgatccacccgcctcggcctcccaaagtgctgggattataggcgtgagcaaccatacctggcctcatactgtgttttgtgtgtgcgtgggcatattccttcttaggctagctatactgagtcattcttgaggagtgttgattatttggcatattttcactggggtgccctcaatgaattggaccctgtacatggggaaacagtgggactgaaatagttacagtgcttgcccctgtggaggctttattctagctaataatattggtaaattaatagtgccaaaggcaatatgagaacgtggaacaggagaacttggggaggatgtcaggaaacacatctgaaaaggaacaaatgtttgaaccttcaagatgagttgtacgtagctaaacaaggggtctagctgtggagtggggtagcggaggaaacttgagagaacattccagatgtacagtctttcaggcagtacgaagcctgctgtgttccaggagctgagaacaggtagagaaagctaaagtagagaaaataaagtactgaatggatgagccaggtgagagagggaggcaggtccctgaagatcatggttagcattggatcttctttttatttattttttttctttcagacagagtcttgctctgtcacccaggctggagtgcagtgtgggatctgggctcactgcagcctccacctcccgggttccagcgattttctggcctcagcttcctgagtagctgggattacaggtgtgtgccaccatgcccagctaatttttgtattttaagtagagatggggtttcaccatgttggccaggctggtcttgaactcctgaccccaagtgatccacctgcctcggccttccaaagtgctgggattataggcatgagccaccgtgcttgacctggaccttattctttttttttttttcttgacatggagtcttagtctgttgcccaggctgcaatgccgtggcacgatctcagttcactgtaacctccgcctcctgggttcaagcaactctactgcctcagcctccctcccgagcagctgggattacaggcgtttgccaccatgcccagctaatttttgtatttttagtagagatggggtttcaccatattggccaggctggtttcaaattcctgacctcaagtgatccacccaccttggcctccagcctgagcaacagagtgagactcaaaaaaaaaggtttacatcacagttggagagagagaggccaaaatcgtttaagaaataaatatcaaatcacaccttcatatgggcagtggaggaaaagtagaagatcttagaagtattttgagggaagctagaagttaaaatgttcctttgatgacatgggaagagtcagtagcagtcactagaggctgttgtttgaaaggtgccttgggggccaacatgttgcttatggagataaatgtcctgtaagggttttgattgtgaccactctgctggagatcccccaaaatgctctgcttccgtcctcaccccttcttttacctcagtgtctcctttattgcagggagaacaccgactgagacctcaaaccctggctccagtgtcatggtgaggaaactgggggctcctgtggctgaaggggtggatatgtaggataactatgtcctctgggccctgtcttctctctcgccacttccgtccccaactgaggaagaaagggaagggtgagtgaggagcatcctcatccctgccctaggggacctagggacttccttctgtgcctgacctctagaggtggcatggaagaagagtcccacagcagaccctggggctctgagcggagctcctccagggccatccttgtcatccctggtgagacctattgaaaacacatgtggccatagaaatataaattcagcttaaattaattaagattcagtacatttagccgggcatggttgtgtgtgcctggaatcgcagctacttgggaggttgaggtgggaggatagcttgagcccaggagattgaggctgcattgagctaggattgtgaccctgcactccagcctaagctacagagtaaaaccttgtctctaaaaaaaaaaaaaaaaaaaaaaaaattaaaaagtttaagcgctcagtttctcagtcgccccagtcacattgcccaagtgctcaacagccacatgtgctggtagcccctttctggaaagcacaggcatggaacattcccatcatcagagagtgatgtctgttggacagcactgctctgaagaattctgcaattaaaaggattctcagatgaggccgggcgtggtggctcatgcctgtaatcccagcactttgggaggccgaggcgggcagatcacttgaggctgggagttcaagaccagcctggccaacatggtgaaactctgtctctactaaaaatacaaaaagttagctgggtgtgtggcacgtgcctgtaatcccagctacttgggaggctgaggtaggaaaatcgcttgaacccaggaggtgaaggttgcagtgagccgagatggcgccactgcactccagcctggacgacagagcaagactgtctcaaaaaaaaaaaagaaaaaaagaaaaagactctcagatgcaatggaagtcctactttcacaagtatataattaaggacgtaagtcttgggggatcccagggacttcacagaaattaagctttcaatcccaaatttgtgatgctgtgccaatttgtaataaggagtttaggaaaaactctctaagcagggagggacaggctctgccatcacaagtcagtggagttacacagagagccataactttacactttaggatttatccaaatgttaaaagaaagtaaacatttcagcttggtggcccatgtgatctctgtcacaactattcagttctgccgttgtggcctcaaaacagccattgatgcattgtaaataaatgcacgtggctgtgtgccaagaaaacattatttacaaaaataggctttaggctggattttccatgcctgctgtgtctgaacattttctcttctccagtgataaccagtcgttctgctcagtggtgggggtggtatttgccgagccagaatgtgtgtgctgttttaggaatccgtcacctttgaggatgtggccgtggagttcatccaggagtgggcattgctggacagcgcacggaggagcctgtgcaaatacaggatgcttgaccagtgcaggaccctggcctccaggggtaaggctggcgtcacctggctccttcctgtacgcaggcactaaatgcttcttaagcgcctgccatgtgaagaagacagacgtggcttaggctttgtggcacttagcgtccacaggatgacaaagcttcatctgttgcattgacttctttccctctgtagtaaggccctgtttgggtctccttgaatttggccccaggcttctgaggtgagacagcctcagccccttggggcagaggggagggtgtttgtgggttgggtcctgagttcattagctattgggcaagatccctttgctacccatcacacttgctcagcccagagaatctgaagcccatattgaagctgaaggagagtttgagttgagaaacaagagtttgttttcccctgcaagccctctctctctcagtgcctgtgtctttcttcatgtgcaggaactccaccatgcaaacccagttgtgtctcccagctggggcaaagagcagagccaaaggcaacagaacgagggattctccgtgccacaggtgttggtgagtaccaggcaggctgtggatcccccgacccccctggttgggtggtgtgccttgggaagtgtcaagagcattttcaaaggccctttgttctgaggggacatcgaaggccattcggagtgaggtttctcaagttcctttagcttctcttctattttcactttctagccctcctctcctactttcctttggtttcagaaaaagatttgttctaatttctcttaaaaaattagagggccaggtgtggtggctcttgcatgtaatcccagcactttgggaggccgaggctggtggatcacctgaggtcaggagttcgagaccagcctggccaacatggcaaaaccccatctctaccaaaaattagccggatgtgatggtgcacacctgtaatcccagctacttgggaggctgaggcatgagaattgcttgaacctgggaggtagaagttgcagtgagccaagattgcatcactgcactccagcctgggggatagagcgagactctgtctccaaaaaacaaaacaaagcaaaaattagagctataagtcacacaccatgaaattcacccctttaaagtgtgcagttcagtggttcacaaccttgtgtaaacatcaccactacccaattccagaacattttcatcacgccaagtagaaaccctgtccccatgggcagttactccccattacccctccctcagcccctggcagccactaatctgctttctgtctctatggattgtcctatatagacatttgtatatggaaatcgtatcataagtagcctttggtatccggcttagtataatagttttgtgttgcaagtaagttagactgggtagtttataaacaatagaagtttatttgactcctggttctggaggctgggaagtctaaggctgaggggctgcatctggtaagggccttcttgcagcatcataacatggtggacgagatcatgttgcaagagaacaagagaggcccagactggtttttacagcaaggccactcttgagataactaacccccttctgaagtaatcacagggcagattcctcgtgacctaatcacctttttttttttttttttttttttttgggacagagtctcgccctgtcacccaggctggagtgcagtggtacgatctcggctcactgcaacctctgcgtcctgggttcaagcgattctcctgcctgagtctcctgagtagctgggactacaggtgcacaccaccacacccggctaatttttgtatttttagtagagatggggtttcactgtgttggtcaggctggtcgagaactcctcatctcgtggtccacccacctcagcctcacaaaatgctgggattacaggcgtgagccattgtgcccggccacctaatcaccttttaaagttccagctctcaatactgttgtatgggaattgcttccaacccatgaactgtggaggacacacttaaactacagcagtatctgtcttctttcacttagctttatgttttccagatccatccatgttgtagcatgaatcagaacttaattccttttttaaggctgaataatatacattgtatggataagctatattttgattatttgttcatcagttgatagacagttggattgtttctactttttagctattgtgaataatgttgctgtgaatgtttgtgtacaatatttcttttttcttttcttttttttttttttttttttttgagatagggtcttgttctgtcgcccaggctggagtgcagtggtgcaatcataggtcactgcagcctcagccttttgggctcaagcaatcctcccacctcagtctcttgaatagctgggaccacaggtgcatgccctcatgcctggctaattttaaatttttttctagagaccattcttcctatgttgcccaggctggtcttgaactcctgggcttgggtgatcctcccaccttggcctcccagagtggtgggattacaggcgtgcgccaccgtgcctggccttgtgtacaagatttatgtagacatgtacttaattctcttaggtatatactgaggagcagaattgctggctcatatggtaatgctatgcttaacttcttgagcaactgtcgtaccactttccaacacaggtacaccattttacattcccaccagcggagatgagagttttgatttatccacattctcgcccatacttgtcatccaattcctctttaaatttaacctttttatgtatgttctttgtctagttctttcttactcttttttctaataacatctgctttctggaaatagtctcagtcctcatagaattcttagctaggaaattgcctctcattttcccctcattcctatgactgccagagtccacacatagccctacatacagatgctgtcttccctttcaggatcttcccaagtctaaggtcagtattaaaagctgggctgggcatggtggctcatgcctgcagtcccggcactttgggtggatcacttcaggtcaggagttcgagaccagcctggcccaacatggtgaaaccctgtctctactaaaaatacaaaaattagcctgacatggtggtgcgcgcctgtaatcccagctactcaggaggttgagacactagaatcacttgaacctgggaggcggaggttgcagtgagccgagatcatgccattgtactccagcctgggcgacagagtgagactccgtctcaaaaaaaaaaaaaaaaaaaaaattagctgggcatggtggtgcatgcctgtaatcccagctacttgggaggctgaggcacaagaattgcttgaacctgggaggtggaggttgcagtgagccaagatcgcaccactgcactccagcctgggtgacagagtgagaccctatctcaaaaataaaaagtaaagaaaacatgtggctcatgcctgtaatcccagcactttgggaggctgaggtgggtggatcacaaggtcaggagttcaagaccagcctggccaagatggtgaaatcctgtctctactaaaaatacaaaaaaaattagccagacgtggtggcgggtacctgtaatcccaactacttgggaggctgaggcagagaattgcttgaactcaggaggcagaggttgcagtgagccaagattgcgccactgcactccagcctgggcgaaagagcaagactctgtctcaaaaaaaacaaaaaacaaaaaacaaaaaacatgtatgtgtgtacacacacacaaatatagatatatatatatatatatatatatatatatatatatacacacatatatattttcaattttatgccactatttctttttgaaaggagtttattttttcccaattcatttcagactggaaatctcaacttgaatatatgtattcggtattaaaatttgaatatttatattcaacattaaaagaaaaagcctatgtgtgtatagtgtgtatatatattcacatatatatgtgaatatatattttcaattaatgtcactatttctttctgaaaggagttcattttttctcccattcatttcagcctgggaatctcaacttaaacccgaagagttgccttctatgcaggatcttttggaagaagcatcctccagggacatgcaaatggtaagatgcacggggttttccccggctcccagcatgggagaagttgaggaacacgtgaggtggaaatacaggaccagagccagggagatgttagcagcatgggtgtctcttggaagggaaacagtgtctgaggggagtgcctgtgacttctgaatttgggcaaacccagactgttgctcaagactttttttttttttgagacagagtcttgttctgtcacccaggctggagtgcagtggcatgatctcggctcatttcagcctccacctcccaggatcgagtgattttcctgcttcagcctcccgagtagttgggactgcaggcgtgcaccaccacgtctggctaatttttgtattttttggtagagacagggtttcactgtgttggccaggctggtctcgaactcctggcctcaagtgatctgcctgcctcaagattctttttttctagaaggtttcctgaaggaaacattttaataaatgtgagtcagacattgagcgtgcgaaatacgacttcctcctcagcaactgtcagaaaaacccctcctggtagagaagccccattgtgaataggaggcagccctgtggtagagctggcaacacactcgacgaactccagctgtctaaacaaggcatggcttgaaaatgctgagaatatgctcccggtggggaggacccctgggcactggcacagatattggcgagctttccaccatcattcacctctttttttggtttttaaaagacagggtcttgctctgccacacaggctggaatgcagtggcatgttcatggctcactgcagcctcaaactcctgggctcaagcgatccttctacctcagcctcccgagtacctgggaccacaggcctgagtcaccatgcccagctaatttttttctttttctttctttttttttttcttagagatggggtcttgctatgttgcccaggatgatctcgaactcctggcctcatgtgttcctcccacctcagccacccaagtagctgggactacaggtgtgagccagtgggcccagccattactcacctcttgtcaggagcaagctccacctggagaaaaggctcctgatgagttgaaaggaggcaggaaatgtttctggaggagctgtaacctggatgtgggtgagagaactggcaagacagaggccactttgattggaaagaatgtgggaaagttgttgggcatccttttcttcttaggagaccagtctagatcccacactggaaggaagcccttttcagtgtggaaaaagccttccatatgagcttgtacattaatagtacaggagaaaatatacacggagtccccaccatcccccctttggccctgaatttcctccgcctcaaacaagaggaccttccaaagtttgagttcccattcctgagtattggtgaaagttagagttagggtttggttagaaggaggcacagagctcagcctcacccccaagtggggcgtattagtcccagggtcagtgagaaccccgggatccctcagtcagtgccccttcccctgtgtcatggatgggtgtcagcatcagagcgtcagggatgccccacacagtggatggggtgcagtggcctcggttttagagacccacattcaacttctttgccagggaagcttctggaacacagagaagcctcaaccctgtgcagcttggtgtgggctgcagatcagccaaaactcacaacctgcctggctgcaacagacccctgggcagctgacagccctcctcactccccaggccctcctcgcccttggtttacactcttgttttggtggagaacaccctccagtagctccttgggatcaggtgcttgggttttgagaccttgacttctgagaatgtcttatcagggctgctggattgcaggttcctcatccgatgtggtggttgcggtaagcctcattacagaacatccttttttctttcttttctttttaaatagatatggggtcttgttctgtcacctaggcaggagtgcactggcacgatcatagctccctgtagctttgaacttattagctcaagtgctcttcctgcctcagcctcctcccgagtagctgggactacaggcacgcaccactacacctggctgattttaaaaaattgttttggagacgaagtcttgctgtgttgtgcaggctcccattgcagggcattctgtgtgtcatgtagcccccagtgcttgttgaatgaaggaaggaatggataaggtgttgcagaaggcatctccagttcccatcctccacctccatgtctctcttgctcagcaggtggaccccatgtgaagaaaggagagagggagggagaatgagcaacgagggcccggtgccctctttgtttctgtgggctctctcctttcagtacagggctccagtgccctccacagaactccacacccagcccagcaagcccctccataatgggtgctgagagtggcaggcatggggctcttgttacatcagagccccaggaaacaggcggtcacagactattctgagtgggcagaggaggtccacctatggacacacgtttagagaagctgaggagttcatccctgaagacatccagcccgtgagtagtagaggtgggtttggagctaggagttgaacccagacctaaccgcagagaccacagtctcagctgtcaggttctactgcctgacgatcatacaacctgctgctgggttgatggtgctgaccctttaggtagcccttccaggccatgccaggcatcattgtgccttgtcacaatcattgagaccctgtatggtggctccgagacctccctgtcacatgggaaaaagtgctgatggccagggacagattgagtccccatggcctccctctctttggtcggctggtccagcagagggaccagtgaagaggagggtgggaaactgctcttagaagagtcccaaggaagccaggcacagggcctcaccccagaatcccagcaactccggaagctgaggtgggaggaccactggagcccaggattttgaaaccagcctgggcaatatagcaagaacccatctctgcaaaacatacaaaaattagtcatggctaggtgtggtggtgtgcacctgtagttcagctacttgggaggctaaggcgagaaaattgcttgagcccaggaattcaaggctgcagtgagccatgtgtttgcaccactgctctccagcctgggtgacggagcaggattctgtctcaaaaaaagaaaaataaaactccccaagggaggctgaggaacaggcctctccaggctcagcccttcttctgtcccaggcccaccccacagctgcctcttctgcagacacctggctccttgaggctgcagtgttgctgctttcatcctctgctgcatccgcagggcctgcactagcagtgcccatgtcttagtctgttctcaccctgctgataaagagatacccgagttgggtcatctataaaggatgcaggtttaattgactcacagttcagcatggctggggaggcctcaggaaacttacaacatggcggcaggggacgcaaacacatccttcacatggtgggcagcaaggagaagtataaacaaaagggggaaaaaccccttataaaaccatcagatcgtggccgggcgtggtggctcacacctgtaatcccagcactttgggaggccgaggcgggcggatcatgaggtcaggagatcgagaccatcctggctaacatggtgaaaccccgtctctactaaaaatacaaaaaattagccgggcgtggtggcgggcgcctgtagtcccagctacttgggaggctgaggcaggagaatggcgtgaaccccagggggcggagcttgcagtgagccgagatcgcgccactgcactccagcctgggcgacagcaagactccgtctcaaaaaaaaaaaaaaaaaaaaccatcagatcttgtgagaactcactcactatttcgagaacagcagcatgggggtaactgcctccatgattcaattacctcccaccgggtccctcccatgacatacggggattatgggaactacaattcaagatgagatttgggtggggacacagccagaccatatcagcccagtacatatttgttcgacaaataggcagaacgcctaaaaacagtttctttaagttgagtgacctgtgtcaaaatgattctgatggaaacatttgtctcaaaatgtacccgtgggattttgatttatgacacagagaggccaatgtcattggaaaattttgattacttgtatttcctgggaggacagggcacaccatgccacacaggtccacacagggaagcaccaaggtcagcctggaggcagaaaggagcgaggggatagcccaggccagagcctttcttggagtttccacagggtaaaccactcaggatttgtcagtttgaataattttagtggaccttgggggataggtgctgtccctggttgatttagggcaggggaaatattggctgggtgagagtgagataaggagctggtacggcatgtgggctgtgggtcacgggatttggagatgaagttggcaggcagtttggccctgtgaatgatggatgccctgtggacaaggacagcattcctgttcagaaccaagatctcccgaccttgctttcttttttggtttttgggtgacttaaacagcagaaacttattttctcacccttatggaggctggaagcccaagatcaaggtggcggcagggctgggttctcctgaggactctctccttggcttgcaggtggccaccctcctgctgcctcttcacacggccatccctctgtgccacacctttctatagtgaaatgtctcatagcctcttcaggggctctgtcctaacctcaggtctgtctttgtatctgcagtgtgttcaagcctcgagaccctcggtggtagctggtgactgccgtaggtggggagtagttactaggtctgaggctaccagatgtcagacctgtgtaccctgactttttttttaagacacaatctcgctctgtcgtccaggctggagtgcagtgttgtgatctcagctcactgcaacttctgcctcccaggttcaagtgattctcatgcttcagcctcctaaacagctgggagcttagatgtacactaccacacttggctaatttttgtatttttagtagagatgggtgtattagtctgtgttcacactgctgataaagacatacccgagactgggcaatttacaaaagagaaaggtttaattggacttacagttccatgtggccagggaagcctcacaatcatggcagaaggcaaggaggaacaagtcacgtcttacatggatggcagcaagtaaagagaccttgtgcagggaaactccccttataataaccatcagatctcgtgagacttactcattatcacgagaacaatcatgggaaagacctgtccccatgaatcagttacctcccactgggtccctcccacaacacgtgggaatccaagatgagattttgatggggacagagccaaaccatatcaatggggcttcgccatgttggccaggctgctcttgaactcctggcctcaagcaattcttcacctcagcctcccaaagtgctgggattatgggcatgagccactgcacccatccccatttgccttgacttctggcagccctaagccccaaaccaaaggtctctcgggctgagaacagctgtggtgccaactctgtcctgctcagcaccctcttgtcttttgccaggggccggggctgttcctgaggatgcagctggtgccctccatagaagagagggagacaccattgactcgagaggaccggccagctctccaggagccgccttggtctctgggatgcacggtaagcctgggagaggttcactgtgatggcaccaggtgcagtcaggaaggcctggggtgtgggttgtctgtaaattgggggaggggagggaaaggagggtgtttggggcctgtaggaggcccaggctgtgggcttggggtggtggagtctgtttctgtgttgaatatacttgtccccagggtgatggcgggctccagggcgggtcctgggggagggtctggttgttggactgtaggccctgcctttcctggtccagccttttttcttcctgtccttccaccccagccccactgcttccataacctcgaaactgacaggaactggcaggtcctatgacctgagggctgggcaagggagcatccaggctcagggaagtgaggacctcttggctcagggccctgcgtgtccttaccaaggcagagagagaatgggagagagatgccgtaaggcaagggtccctaacccccaggccgtggaccagtactagcccctagcttgttaggaaccaggctgcagagcaggaggtgagcggcgagcatccatgcctgagctccgcctcctgtcggatcagcagcagctgatcctattgtgaactgtgcatgcgagggatctaggctgcaggctccttatgagaatctaactaatgcctgataattgaggtggaacagtttcatgctaaaaccatacccctaccctgctttgtggaaaaattgtcttccatgaaactggtccctggtgccaaaaaggttggtgactgctgctgtaaggcacgtcctgagccctgcatgaggagaaaaggcctcttcccactcgtccctgccctgttccctcccccgagggacctgctgcatgtaccccccaacctcccatccaccaccaagtcctgctagcgttatttccaaaatgtaacccacctccagctgcctctcctgtccctgctgctgccatcctgcccagagccaccgttagttctcctggactccagttctgctcctgacaggcacctgggctccaccctggacacagaggccagagggatcccttagaagtgcaagtcaggtcagacgtgtttcctgagcgagcagctgccagcagagaagagaccacatcctactccaaggagaggtcttcctcccagaaaaactcactgactgcctgctccgcattcacgcaggtccacctccaaactccatcttccctccacccctcaacctcctggccatccactccccacttttttcccagcttttccctgacttctggagcctccttggagggtgccaccttccccagcccctgcctgggtgccctctctccaggccattttggatcacagtgattagctttgtatttaaggattgggtaaatcctgacaaggtaaatgggtctctctcttcttttattaatatgttccccaaagcaggatcaaatatgcacgttcatttggggtgagcaggtgtgagtggccccctcagcttcttgactctaatctgtgacccctgtcactctgtccagggactgaaggccgctatgcagattcagagggtggtgataccagtgcctactctgggccaccgcaacccatgggtggccagggattctggtgagtgagtgctgcgtggaacacgtggccagagggccctgctgtccttgtgttctgtccaggaacttgtatcctatcctgcctgcatttcctctgactgcaggcactgccgtggcaccatagagaggatacagaaggcctctctcattatttgtgtgtttaagtgggagggcacttccagtgacagatctttaagaaagagagggctcactcaaccacagcaaaggccagacctctctttgggcaacatgaaattcttgactacacgataatgttgattttgaaaaattatgattgaatttactagaaatggcctgtgttttaactgtgtttttataaatgaggttcaggccggttgcagtggctcatgcctttaatcccagtgctttgcaaggcctaggcgggaggattgcttgaggccaggagttcaagaccagcttgggtaacatggtgagacccctatttctaaaaaaaaaaaaaaaaaaaaaattagctgtgcatggtgcctctcaagtcccagctacttaagaggctgaggcaggaggatcgcttgagcccaggaggtcagggctgatgtgaactacagtcgctttattgcactttgcagcctgggtgacagaatgagtccctgtctctaaagaaataggttcaaagccacttctcctgagaagtggggaagaaattaattctagaagacaaataacattttaactttaacagtaaggtgtttgttttcttctagttggccttctagtaagaataataagctttgtttcttttttttttttttttttttgagacggagtctcactctttcgcccaagctggactgcagtggcactatcccggctcactgcaagctccgcctcttgggttcatgccattctcctgcctcagcctcccgagtagctgggattacaggcgcccaccaccacgcccggctaattttttgtatttttagtagagacggggtttcaccgtgttagccaggatggtctcgatctcctgacctcgtgatccgcccgcctcggcctcccaaagtgctgggattacaggcgtgagccaccgcgcccggccataaactttgtttcttaaaagtgccatccactcttgtgtctggaatctctgttttcttcttgacagggaacaattcttagatctaagtcttgtgttgctcttcagtatatttttggtaagtcttctgggccaggctctattttgttacttcttctttttttattttattttaattgagacagcatctcgctctgtcacctgggctggagtgcagtggcacgatctcggctcactgcaacctctgcctcccgggttcaagcgattttcctgcctcagcctcccgagtagctgggattacaggggtgcgctaccatgcccggctaatttttgtatttttagtaaagacggggtttcaccatgttggccaagctggtctcgaactcttgacttcaggtgatccgcccacctcggcctcccaaagtgctgggaccacaggtgtgagccaccgtgcctgacctattttgttacttcttgaagcgggtaacaccactactgtcatccgatggtgagatggggaccaggaaacagtcacaaagaaaacaccgacccctcctccgtggagctcacggtcagctgggtggtcagagttcgaaatgaataacagagtccagtggaagtgtgttatacaaggacttcatctcaggggacgggagagttctgggaaaggatggatatttaagcttaggccagggtttctcaactgcagcactgctgataatgggctactgcagcactgctgataatgggcctgttcactctcagctgtgggccgtcctgtgcattataggatgctgagcagcatccctggcctcaactcactagatgctacgagcacttttcctctatgagtttgctagggctgccatatcaaagttccaccagctgggtggattaaacagcaaaaatatattgtctcaccgttctggaggccagaagctcgagagcaaggtgttggcagtgttggttccttttgaagcctctccttggtgtgtagatggccatcttctctctatatcttcacatcatcttccctctgtccatgtctgtgtccaaatgtcgtcttcttgtgatagggtttggatttgtgtccccacctaaatctcatgtcaaattgtaatctccagtgttggaggaagggcttggtgggaggtgactggatcatgggggtggacttcccccttgctgttctcttgatagtgagtgagttctcacgagatctggttgtttaaaagtgtgtagcacctcccccttcactctcttcctcctgctccagccatgtagcacgtgcctgcttcccctttgccttccgccatgattgtaagtttctcgagtcctccccagccatgcgtcctgtacaacctgtggaaccaggagccaattaaacctcttttctttataaattccccagtctcaggtagttctttatagcagtgcaaagcagactaatacgtcttgtgagtacaccagtcatattgggctagggcccgccctactgacatcattttaatttaattacctctaaagactctatgttcaaatatggttaccaggggtgagataagatactaggggttaagacttcaagatatgaatttttgaggtaatacaattcagctcataacagccacataccccctagtcatgaaaagctaaaatgtctctagatgctgcagactgaattgtgctccccttctccaagttcatgttgaagccctattgtctcccccgaaggtgccattggaaatgggacctctaaggaggtgataaaggttaaataaggtcataagggtgaagccctgaaccaacagaactcatgcccttacaagaagaggaagagacaccagagctctctcgcccatgtgaggacacagccagaaggcagccatctgcaagccaggaagggagccctcaccaggaaccaaccatgctggcatcctgatctcaaacttccagcatccagaactgttagcagcaaatttctgttaagtcacctagcgcatggtattttggaatgacagctcgacagctcaacaccagacattgccaaatgtcccctgggggtcaaaccctgacctagaccatgataaatactataacatttagcttggtcagctgttgggctgtcaggaggttcggagagaggatatcaggcttaggaacaacattgataaaattccccatggagcagagaactggttgcatccagggcccatggaagatggtgtgaaggcagcagggagaagtggagagagagtggtgtgagctgactgaagaagaagcagcttccagattgttcagggcttggaagtgcaggaaaagaaccttggcccatgttctaagcccgctgggagccagtgacgtgtttaggtgagtggtgcaatgcacctgtggttttaacagaaccgcaccccccagcccacctgtgaggagcgtgggctcagggaggaaagcagtggtaggtggaggccattaggagtagaatggtgctggtctagacttgggggttgagtgtggaggaggtgtgctgggttcccccaagaccaccccagtcttgatgatccactaggaggactcacaggagatgtcgtactcgtggctgtgatttattaccagaagtggatatgaagcagaatcagcaaagggggtgccaggtgtggtggctcatgcctgtaatcccagcactttgggaggccaaggtgggtagatcacttgaggctgggagtttgagaccagcctggccaacatggcgaaaccctgtctctactaaaaatgtaaaaattagccgagcatggtggtgcatgtctgtaatcccagctacttgggaggttgaggcaggagaattgcttgaacccggaaggcggaggttgcagtgaaccaagattgcgccactgcactccagcctgggcgacagagtgagatttccttcttaaaaaataaaaaaataaataaaagtaaataaaagaagtgtatctgactcatggttctgtgggctgtacaagaagcacggcaccaacatctgctcctggcgagggcctcaggctgcttccacttaggtcagaaggggaagggaagccagtgtgcggagatcacatggtgagggaggaagcaggagcgggggcagtgggggagggaagggaagggaagggggaaaggtgccaggctctttttaacaaccagcttccttggaaagtagtagaagagtactccttctctctgagggagagcgttaatcaattcttgagggatctgcccccaagtcccgcctccgacactggggattaacgttttggtgtgagttttggaggaaacaaacagtccctaaattccagactttcagaaggaaagcaggtgttcaacataaactgcattgtttgtacaagcagtttaagtggagcgagtttctcttaccagttaggggggcgggaaccttcctgaaatccaagttcccagactccacccaagggccaaccttgcaaacacatctcattaaggagcccatccaggcctgctgggttaacgcctttctgcacagtagggaagtgaggaatgatttaaaacacatagaggccagcactttgggaggctgaggtgggaggacttcttgaggccaggagttggagaccagcctgggcaacatagcgagaccccatctctacaaaataagaaaattagccaggcatggttgtgtgcacctgtggtctcgctactcaggaggctgaggagggagaatcacttgagcccaggaattgaaggctgcagtgagctagtccagcctgggtgagagagcaagaccctgtctcaaaaaaattatagtaataatgcatataaaacatttatattgaggaggttgagttgatttggtggttcatgtattcatttaccaatgacatggagcatttttgtgccaagtaaggtatcggggacaggatggtgaaaggcacccaggcttattcttacaaagcttccaatccagtgaggatgacagaaaagaaacactcatggcagcaatacatagctggttacagatgggtaagggctgcgaagaaagggaaggggtcctatcagagaaaaggagagaaggggctctttctacaggggaggagacctcaggatggggcactctgagggcgacgtttcagtggatccaaaaagaaaaggctctatgtaggtgttggctgtagcgggaatgggtgggagaggggcttgggggtgagtaccgccatgtagagacgtcatcactatttattctgattagttgctgggatctgtagagtgtcagagaggggtgagatttctgatcaaagacaggggcagcacttcctgagattgaggacatggttagggagagcaggctttgggaggacggtgatgagtgttttttttttttaagacatagtcttgctccgttgcccaggctggagtgcagtggtgcaatcttggctcactgcaaactccatctcctaggttcacgtgattctcgtgcctcagcctcccgagtggctgggactacagatgtgtgccaccacgcccagctaatttttgtatttttagtagagacggggtttcgtcatgttggccaggctggtctcaaactcctgacctcaaatgataatgctggcctctgcctcccaaagtgctgggattacaggtgtgagccactgtgcctggcctagtttttttgtaacagaaatttctctttcacaatttaggataccaaaagtccgaaattaaggtgtcgacagggccgtgctccctctgatggctcgggggggaggatcctgccacctgctttctaacagtggcctgcagcccttggtgctccttggcttgtggatgcagccctcccgtctctgcctgtgttgcctcatggctgtgtcacctctgtgtatctgtctctgtctcttctgttaggagaaccatcatattggattaagggcctaccctattctcctgtcgtctcaactcattacatctgcaacaatcctatttccaaataaggtcacattttgaagtactgggggttaggacttctcttttttggggggttcacagttcaaaccatagcagtctgttctctagtccccccaaattcatgtcctttccacatgcaaaatacactcacgtggtcccaaagttttaatccattccagcgtcaactctaagtgcaaaatctcatctaagcaccatcaactcaaagtttcatctcatctgatgagaatcccacaactcttcatgtcagtcatctacagcaggtatgagggagactcagagtgtggtccattgtggggcaaaattcctctccatctgcgaacctgtgagaaatcagaaagcaagtgatctgcttccaaaatacggtgatggggcaagcaaaggatagacattcccatttcaaaaggagaaaaaggggtcatgggtcctgagcaagtttaaaacccatcagggcaaatgctatgaggtttccaggcctggaacaaatcctctatggttggaagctctgacctctggacctcattttgggtaccttctattcctgttcccttagatgggcagaaagatttgagccaatggttggatacatggtctggtgttcagatgtgagagtcagcctggagatttgggcttcatcatgaagtttgggaattgacacccagagaatgggtgaggttgcacaccaaggcagagagaattgagggagacacgaagaggagggcctgcaacctgtggacgccagcaacatgttggagaagaagctcttacaggaaaaagaggaggctggggttgtgatcactgatcacaggctgggtgggctacaagaaggagggattggctaggtgcagtggcttgcagctataatcctggctactcaggaggctgaggtgggaggatcgcttgaggctaggaattcaaggctagcctgggcaacatagtgagacccccatctctaaaaaaataaaaaaaaaattaacagggtgtggtggtgcacacgtgtagtctcagctacttgggaggctgaagtgggaggatcacttgggcccaggagtttgaggctgcagtgagctgtgattgtgccactgcactccagcctgggtgacagagcaagactctggctcaaaacaacaacaaacccaggagagattggatgatgagcacacatcagtgggatttcccagcacggatggaggtcactggtgattccagggtggtgccagcccttggaacggtggagatgggaagcaagtgggaggggaggaagtgggcacagagggtagatagcccatgatagggaatgaagagatagaggtagcccaagggaaaagtggggtgttatggcttgaattgtgcccctccaaaaagacatgctgaagtcctaaccctgtgaatgtggccttattggaaatagggtctttgcagctgtaaccaagttaggaggtcacaaggttgggccccaatccaacatgactgtgtccttatgagaagaggaagacgccacgtgaagacagacacgcagggaggggaccgtgcgacggtggaggcagacattggagtgatgcatccacaagccaaggagccccaagtgtcgatggccgccaccagaagccagggaggggcaaggaaggactcttctcagagcgtcagaggaggcgtggccctgctgagcttaactttggactcctcgtctctaaaactgcgagaggatacatttctgtggttttaagccactcagtttgtgatactttgttacggcagctgcagaaaacacatgtggggtcagggattgggtgtgggtcaggtttaaaaaaagtgaggggaaaggtcccatcgggagggagaggtgaggatgcaggggatgagggatgatctgggagttgcttgcttgtctgtcataggccagaaggaggatgcctggtgcagagcgaggagtggtgttgatttgaaggcaggtgggaaggaagtttctttttaaggcagacttgcaggttggttgtggtttatctgcccttgatttgtggtaagtcctggagcaccactagccctgcagtgtagaggggcagagaaaggggccaggcagccggggaggaaaagctgtcccaaagctgagtcgggacagtggtgggggctgcaggagctttggagtctcctggtgaattatggagtctatggctcttgggatatggaatgaaggcgtgcgtgtgtgtgtgtgtgtgtgtgtgcacgtctatatgtctctttgtgtgctggtctgtgtgtatatgttatatatatgaacaggtgcatgtggtatgtaactgtgtatatgtgtgcgtgtttgtgtgtatatgtgtgcatgtctgtgtacgtgtgtgcatgtgattgcatgcatgcgtgtgcaagagcttgcagatatgtgtctgcatgtgtgtgtccctgtgagtgtgtgcatgtgtgtgtgtacacatgtgatcactcacagccagggtgggcagacttggggcctgtgagtgtgcccagtaggccaggcaccaaccctcatgcctcttcccttctcccctagctgtgcctgcacgtgaccctgcctggcttcaggaggacaaagtggaggaagaagctatggctcctgggctgccaaccgcctgttcacaggtaggtaagaacttcttgttctaaaagaacactgctgtgcccaaaggctggacttaccttcttcctgtgacctgtctggatcatctcatagggttggtctccatgctttcagggactgggcctcttgcagtgggtgtcagcaagggagcatgggccatgatcccaccacctcattcagaccctccccaggctgctgagcaccaggagggaaaacaaagcaaggatgtcagctgtcctcattttgtggtcttcatggtctcactgaacaaagagttgagtcattttccagatagttccctcttgcctgtaccatgctcaggtctgctggaccctggagctagaagggggacaaatctgtaagagcttcctggctccttgtcaatagataagtcctgtccagaggtcgaggacttgcaacattagttattgcctcttgctgttcttacttaaggagtggagagtagagagaggagttctagttcagagtcctgagctaagggccagattctgcgggatctcagaaccctgtctgaaagtcctctgcctgggttttcccttccccaggcttgccagcctccagcatcctctggcgtactggtgggggtggtccctggctgagccgggatggatgtgtgttttaggaaccagtcacctttgcagatgtggctgtggtgttcaccccagaagaatgggtgtttctggactctactcagaggagcctgtatagagatgtgatgctggagaactacaggaacctggcctctgtgggtaaggcagcttcatcttttctttccttttttttttttgagacagagtcttgctctgttgcctaggctggagtgtgatggcgtgaccttggctcactgcaacctccgcttcctgggctcaggtgatcctcccaccccagcctcccgagtagctgggaccacagggtgcatcatcacacctggctaatttttgtatttttttgtagagatggagttttgccatgtttcccagactggtctcgaacttctgggctcaagtgattcacctgcctcagccccacaatgtgctgggattgcagacatgagccactgtgcctggccaaggctttgccttttcatcacatttatgtaccaaccataagctctagaaattgtgcaagtctgggaaacctagtggtgaaaaaaaagataattcccaccttcatgagcttccagtctacttactggcctttctatggaatgaagatctttttactgccctgtctttctgtgactaaaagtttttgggcttctcaaaggtattccttagctaggcccttggttttgtagaccggagagcctcagtgtcctctgagacctagtgagggaacttgtatttagttgctcagtggaagagtttggctgtggccatcagaatttaggcacatgcattttgccactcccatctctagagcccctaaagacttgagaatatcggccctggtgtcagggcatggcacagtcctcgcacaacatgtgtttttttctcatgagcagctgatcaactgtgcaaacccaatgcgttgtcttatttggaagaaagaggagagcagtggaccactgacaggggcgtcctctcagacacctgtgcaggtgagcccaggcagatcaggtgagcatcagctctggtcagtaaggggagtgtccagtttggaaactgtcttatcagggcaacctattcatacctttgactgagaagcctgtttggttgagctcccttattaaatgccaccttctttcctttttccctttcctttttaatctctaaaactttgcattcatctcctagaaagatctgtcctactttctcttcatatttaatatttccatgtgtatattttatccatttcctccccactgtacattcttgctaatatttttcctcaacattagtcacaatctttgtagaatccttttttggtaaattacctactatttccttcccatgttcctctgattacataacttctcatctagccacacaccttaaaattttccttaacttttagatgcattccttctcattgcaatttcttcccgtacataggaccagtatttgggaaaaaaagtccacatgtgccttgcctacttttgaggtgaccttgatcccacagtttctttctctgtgtgcttaactttttcttccctaattcatttcagaacctcagtgtcaaccccaagaggcaattcctagccaagatacttttacagagatcctgtccattgatgtgaaaggggtaaggctcaccagggattattcatggttctctatagtaggatgagtctggggttaaccgtaagttagaaaagcagcccaagagccaagagcgattcgaggcaagaagtgtttacccagaaggaagcagtttcttgggagagagtccgtgaatgtcatgaattggtggaaaactaaatgtagatcatgttcgtacaagtaagcattttcacagatatgacacatacaaagtgtttaagacttaatttagccttacacaaattggaaaaattctgcatctaagaagctgcatgaaaataatgaaaagatagctctttgcaacagagtatccaccctattccacttgaaggaactctggatagaaatggtatggactccataaatggtaaaagtatcagatatagaactgtctttttcttacattcatttcacataggggagaatatctgtgaatctaataaggcctttggtcttcacattttccttcatcgacaggagcaacctcagcctggagaaaaactctataaatataatgaacttgagaaaccttttaacagcattgaaccacttttccagtaccagagaattcatgctggagaggcatcctgtgaatgtcaagagattagaaattccttcttccagagtgcccacctaattgtgcccgagaaaatccgtagtggggataaatcctatgcatgtaacaaatgtgaaaaatccttcagatacagctctgaccttatcaggcatgagaagactcatactgcagagaagtgctttgactgtcaagaatgtgggcaagccttcaaatattcctcgaatctccggcgacacatgagaacccataccggagagaagccatttgaatgtagtcagtgtgggaaaaccttcacgaggaactttaacctgattttgcaccagagaaaccacacaggagagaagccctacgagtgtaaagattgtgggaaagccttcaatcagccatcatccctcaggagccacgtgagaactcacactggagagaagccctttgaatgcagccagtgtgggaaagccttcagggaacactcttcactgaagacacatctgcgaacccataccagagagaaaccatatgaatgcaaccagtgtggcaagcccttccggacgagcactcatctgaacgtgcacaagaggatacacacaggggagaaactgtatgagtgcgcgacttgcggtcaggtcttgagtcgtctttcaaccctgaagagtcacatgcgaactcacactggagagaagccctatgtgtgccaggaatgtgggcgagccttcagtgagccctcatccctcaggaaacatgcaaggactcacagtggcaagaagccctatgcatgccaggaatgcgggcgagcctttggtcagtcttcacatcttattgtacatgtgagaacacacagtgccgggagaccctatcaatgtaatcagtgtgagaaagccttcaggcacagctcctcactcactgtacacaaaagaacccatgtgggaagagagaccattaggaatggcagcctgcctttatccatgtctcatccatactgtgggccccttgctaattaacttccattttgtaaaaatataaacacatggggctatgactttccctcgtaatactcctttagctgcatcctgtgtttcaatgtataatattttcattttggtttaattgtaagtattgtcttaacctccattatcgtttattctttgacccatctattatttggaattagatttttcaaaactaatatgtggatatattttcatagaggtataatgacttatagtgaaatgcatacatctgaagtgtacagttggatgagtttgacagatgcatacatgcatgtaaccaccaccccattccagatatagaatgtttctatctctctggaaggttcctgcatgttatatggctatttcttagttgcctttttgttgttggtttctaatttaattacatggtgagaagagtatgtggcctctttgttactgagtcataggtatttgctgagatttgctattaggtctggtgtggcttattcttctagctgccaacccaaattaccccttcctccttagaaaagaacctgggttttctgttcagattggcagtgtgcactattaaaaagcttccatctcccggctgggcacggtggctcatgcctctaatcccagcactttgggaggctgaggctgggggatcacctgaggtcaggagttcgagatcagcctggccaacatggtgaaatcccctctctactaaaaatataaaaattagccaagtttggtggcatgcacctgtaatcccagctacttgggaggctgaggcaggagaattctttgaacccaggaggcagaggttgcagtgagccgagattgcgccactgcactccagcctgggcaacagagtgaaactctgtctcaaaaataataataataaaaaaaagcttccatctcccagcccttcttgcaagcaagggcaggccatttcctccggtcctggctagtatgaatatgagaagtcactggatgtgactctggggaagatattgtgttcagggatggtttcatgtagccacatctctccacttcttgccttttggacaagtagacatgatttctagacctagaggagccctcctgtgaccataagggtaaaagccgcaagctaagaagagggtggccggaagtcataaccatcttgcttctgtaatctaaaaaatatttaggatagatttaatagaattggcatatttatgtgattgcagcagccctggactatttatttctggatgtcccatacatgaaaaatatgcacttcttactggtacagttttcttttgtttgtttttgtttttggtgggaggtttatttcacctgaatataattcctaactgatgcacttagtatatgtcagtttttataaatgcttcatggatggttgaaatcaatgtattgtattctacaaatgtctgctagatcaagcaaatgtgtttaaaaaccatctacacatttataaatgttgatctgtgatctagcatttattgagagaggtatgttaaactctcccaccatgattatgtattgctgaaaaatctttgtcattctgtcagtttttaaatttatgtatatacatacatatatatgttttgaagcaatgaaattaaatatagatactgacattttttacatttccaacaaattgttacttttattcttataaagtgatcatccttttccctattactgaacattcaaccattcattgtaatgatagtaaatacttatttagagtttactattaatagatagtagccactgcctgaagctttgcatcttttaatttagtcctcacactgacactttgaggtatgtactgttatccccaattcccagatgaggaagctgaggcccagcaagttaaggtgggctatcaaagtcatctgggtggcatgtgacaggcctgactctctctacagtggcagacccaggggactagtctccatttttacttgttctttttttttttttttttttttttttggttttaaagttctcttaggtataacttacataaacgttaataaatcttagggtacaccttggtgaattttgtatatgtctatacccaccacggtctccatcaaaatattttatcgtcccagaaatttcccttgggccccacctcatcctcaaaggttatcactattctgatgtctatcaccatagatttgtttttcctgttcatgtaaatggaaccataaacagccctcttgtgtctgttttcttcacttaatatagtgtcattgagatttatctatgttgtattatcagtagtttatgctttttaattgctgtgtaatagtccatagtctgaatataccacaatttaaaaattctattctgtttacaaacatttgagttctgtcctccaggttcatccatgttatcacaaatgacagaatttccttcctcatcaaggctgaatagtattccattgtgtagatataccacattttctttatccattcatccaccgatggacagttaggttgattccatatcttggctattgtgaataatcctgcaggttttattgttatgaataaagctgctgtgaatgttcttgttaagtcatactgtggacataggtattcatttctcttgagtataaatgtaggaatggaattactggattttggaggagacctatctttagctttagtagatcttgccagacagtttttcaatgtggttgaaaccatttacacctcaatttgtacatcaatgaatgaaagtttcattgcttcacatccttggcaacatgtggtactgtcacgcaaattaatttgagctacattagtgggtatgcagcagtttcttaggtttaatttgcatattcttgataagtaatgatgcagtggtagatggttgccacaatgacttcttctatccctctatgtatatgtcttttccatgtgactttgcagctcctcctatcaagaggtggagtttatttctccaaaccttgaagacgagcttggtcatgtgactttctttggccaatggagtgttgacaaacatgacagaagcagaggctggaagaacacacgttgggcttttccttcttagttgtgaccatttgtatgtcatctgtggaaaaatgtctaagtcctttgaccatttttaaattagttttttgttgttgttgagttgtggaagttctttatatattctgaatattaaccccttatcagatatatgatttgcaaatattttctcccattctaggggttacctttttactttattaattgtatcctttgatatgcagaagtctaagattttggtgtagtccaacttatagatattttttgttttctttagatgtcatatccaaaaaatcattgcaaatctaatgtcgtgaggcttaccccctatgttttcttctaagagtcttattgtttcagctcttgcatttaggtctttgatgtattatgagttaatttctgtttgtttgtttgttcgtttttgtgtttttgagacggagtcttgctgtgttgcccaggctggagtgcaatggcgcaatcttggcttaccgcaacctccgcctccccggttcaagtgattctcctgcctcagcctcctgagtagctgggactacaggcgcataccaccatgcctggctaatttttttgtatttttagtagagatggggtttcaccatgttagccaggatggtcttgatctcctgaccttgtgatctgcctgccttagcctcccaaagtgctgggattacaggtgtgagccaccatgcccagccaagttaatttttatatatggagtaagaaaagagtccaacttcattcttttgcatgtgcatatccagttttcccagcaccatttgttgaagactgtcctttccccattgaatggtcttggcacccttgtcaaaattcatttgactataaatgtgaggttttatttctgggctccctcctcgattccattggtctatatgtcttatctttatgccattaccgtattgtgttgattactgtagttttacaataaattttgaaataagtgtggtgtgagacctccaactctgttctttttcaagatggttttgacttcttggtttggtattcttgagatttcatatgagttttaggatggatatttttctgtttctgcaaaaatattaagtcattcagcccgtgaacatagtatgtctatttgtgtctcttttaagttctttcagcaatgctttttagctttcagtgtacaggttcttcatctcattggttaagttaattccaaagtattttattgtttttaatgctgttgtaaatggatttgttttctcaatttcctttttgggttgttcattgttagtgcatagaaatgcaactgtttttttgtgttgatcatcacacttcttttgcaacccatattatgaagtgtcactactctccttggtccaagttaaaatgctttcctggatccaaatggcatttcttttgtggggaattatcaacagtaaagatctaggttgatcaaaactcaagtgtgagaaatgaccaacaggagagggcagagatatccatgggatggagatgaaatagcctttgttattatgggtatattatgggcctcttttctcatccaatccaggatgctgacattcaaggtgacagatcagctgttcatcttgggctgcacctggtgtttgggcattctgcaggtgggcccagttgctatgctcttgcctatctcttcaccatcatcaacaccctgcagggtgtctccatcttttggtgtactgccttttcagtcaacaggtgccactgtctaggtcccactcaagactcttcttgtccttgcctatcttaatgagctgacccagaagatgctttgcctctagcaggtctggggacaaaacaagaaatggttcaaaaagatcagaatgagaagagctaggtctgagaaatacacacactttagaagggctgtgcctgatgccttcaaacctagcacagtaagatcatacattgctcttccccacatagcttctcttactgattcacttggggagcacatggttataacactggcaacctggtccacagtgggtgatgttctaggatggctcacacgaggatgggtcacacttggttgatttattggatgacattttctccattaaaaagtttgtttaagccgggcgcagtggctcacacctgtaatcccagcactttgggaggccgaggcgggtggatcacctgaggtcaggggctcgagaccagcctggccaacatggtgaagctccatctctactaaaaatacaaaaattagttgggtgtggtggcgggagcctgtaatcccagctactctggaggctgaggcaggagaattgcttgaacccaggaggcggaggttgcagtgagccgacatcatgccattgcactccagcctgggcaacaagagtgaaattttgtctcaaaaagaaaaactttgtttaaaaatttggctattcctcattaggtgactgtgctgcttgattcttacacatgtgcattaattctttccgtgaaaatattgagcacctatttggtgctgtatttaatgctatgttcttcataaatgtaggcaaataccaagcacttttagggagagatgtactgtgttagtctgtttttgcattactaaaaaggaatacctgagactgggtaatttataaagaaaagaggtttaacgggctcacggttctgcaggctctacaagcatggcaccagcctctgctcagcttctggcgagggcctcaggaagctcacaatcatggcaaaaagtgaagcaggagcaggaacatcacatgatgagaatgggagcgagcaggcaggggagattgcatgctcttttaaacaaccagatctcgcatgaactactagagtgagaactgacagcaccatggggatgacactaagccattcatgagggatttgcccccatgatccgaatacgtcccaccagtccccatctccaatattggggattacatttcaacaagagatttggaggagacaaacatctaaactatattattctgcccctgccccttaaatctcaataccttctcaaattgcaaaatacaatcatcccttctaaatacctccccaaagtcataagttgttccaccatcaactcaatcaaaagtcccaagtcccaagtcaaaagtctcatctgaagatgaattccttccccgtgagcctgtgaaatcaaagacatgttatttacttccaagagaagatggtggtatgggcactggttaaacattctcatttcaaaagggagacacaggccaaaagaaaaaggcaacagacctcatgcaagttgtaaacccagaagagcagtcattaaatcttaaagctccaaaatctcctttgactccatgtcctgcgtcaagacacactagtgcaagatatgggatctcaaggctttgggcagctccagccctgtggctttgcagggtgcaacccccatggctgctcttatgggttggagttgagtgcctgcaggtttttcaggcagagggcacaagctgccagtgaatctaccattctggggtctggagggaggtggccctccagctccactaggcagtgccctggtagggattcttgtgggggtacgggggaatccaatcctaatagagttcctctgtgggagctatgccccaatgtcagtctccttcctgggcaccgtggcttttccatacatcctttgaaatctaggtggaagccactaagcctccttcatgcttgcaatctgagcatctgcaggcttaatactacctggaaccaccaaagcttacagcttgcaacctgcagagctgcaacccaagctatacctgggcccctttgagccaaggctggagccttgagtggctggaacgtggagaatggtgtccaaaggctgcacagggcagcggggccctggaactggcccgctaaatcattcttttctcctaggcttctgggtttgtgatgggagaggtggcctggaagatccccgaaatgccttcaaagcctttttccttttgtcttggatcttagcacttggctcccttttagtcacgttagtctcttcagcaagtggtggttctgcagccctcttaaattcttcccccgaaaatgctctttccttctttaccgcatggccaggttgagaattttccaagtttttatgctctgcttccctttttaaatataatgttcaactttaattcctttgctcccacatctgactgtaagctgttagaagcagccgtgcctctccttgaacactttgctgcttagaaatttctcccaccagacactctctaagtcattactattaagttcaaacttcccgaaagccttaggacatagacgcaatgctgccaggtcctttgccagggaataacaaggctgacctttgctccagttcccagtaagttcctcatctgagacctcctcagcctgaccttcactgtccatatctctaccagtattttggtcacaaccctttaaccagtctccaagaagttccaaactttctctcatattccttcttccttctgagccctccaaactcttccaacttctgcctgttacacagttctaaagctgctttcacattttcagaaattttctgtattagcctgttcttgcgttgctataaaggaatacctgaggctgggtaatttataaagaaaagaggcttttttttttttttttttttttttgaggtggagtcttgctttgttgcccagacagtgcagtggcgcaatcttggctcactacaagctccgcctcctgggttcacaccattctctcacttcagcctcctgagcagctgggactacaggtgtccgccaccacgcctggctaatttttttgtatttttagtagagacagggtttcaccgtgctagccaggatggtctcgatctcctgaccttgtgatccgcccgccttggcctcccaaaatgctgggattacaggtgtgagccaccaagcccggcccaagaaaagaggtttaattggctcactgttttgcaggctgcacaaacatggtaccaacatctgcttgtcttctggtgagggcctcaggaagcttgtaatcacagcagaaagcaaagcgggagcaggcacatcacatagtgagaccaggagcaagagacagagtagagacgttccatactcttttaaacaacctgatctggtgtgaactaccagagcaagaactgacttacagcaaagggattactaaaccattcatgagcgatttgcccccatgatccaacacctcccaccaggccccacctccagcactggggattacatttcagtgtgagatttggaggggacaaacatccaaactatatcatgtacctattagttaaatataaccaaatatctgaggcagtgatttacaaacttaagagtcccagtatcctaatcatttcctttaatcccatttaatgttaagtctcaccttataccctcttgcccacaatggtggaaaatcaatggcttatgtatacatgcatgcaggtacacctttataaagtaaactgagctatcttaccttggaattcagagtttataaaaatttccagtacttaaaaatatatttggccaggtgcggtggctcacgcctgtaatcccagcactttgggaggctgagacaggtggatcacgaggtcaggagatcgagaccatcctggctaacacggtgaaaccccatctctactgaaaattagccgggtgtggtggtgggcgcctgtagtcccaactactcgggaggctgaggcaggagaatggcgtgagcctgggaagcggagcttgcagtgagccgagattgtgccactgcactccagcctgggcgacagagcgagactccgtctcaaaaaaaaatttttttttcagaatactcaagctgcaaaatttgagctgagacttggtaaaggcatgagataattcttcgaatattttttctatctacaggctgaagacagaaacctcgctgcttagtgtctcttcttatgctagggtgtgatgacagtctgtttctctgaggtctggctgaagttgtgggggtggtcttctcctctcatccctgaggtctcttctgtagcttcatatcagtttttaaatggtcatgttatcttgctaggatatgtagaaactttgtcttatgtttagctttgaagaatttcttgaagcacatcacttataaatgtattcaatagaaagatgagcaggtgaagccactcatctcaaacaacagttactgcatcaaactttctctagacctgggaatgagtgacctatgacgacaatggaaaggatgaagaaaatggcaaaaacttccatgtgaatccctttacaccttaggtcatgttgaatataaaaatgctctagcaataaatgctgggtgctgcaaagtgaaaccagcactgaggcaaaagttctctcagcaaggcagtttacttctgcagaagggtgccacccacgtcaatcaagatccaagagcacagagaacaaaggaggccaggggggttttatatccttaacgcaatccctgcctccatgtccttcccccatgggctggggtcggcacaatgtaagctgacccgattggctacttgcgaatatttctctcaaataaagaagggggaaggggacgtgagttacaatggtgggacgtgcagttttgaagggtatgtgtgtggttttgaggggtggaacgggtgcagaatgcgtgaccgagggaacagatgtgagttattgattagtgccgacgggaaggctgtttatagtaacttggggcagggaggcatagagacaaggaagttaacagactgaacctttgaagagaaaccgagagattcattgcatcctacagtcagggtttctcaactgtgaccttattggccagataattctttgctgtaggaactgccctatgcactgaagactgttgagcagcatccctggactattaactaaatgccagtagcttgggttggggagatgttggtcaaacgatacactttttttttttgttttttgagacagggtctaattgttgttcaggttggagtgcagtggtgtggtcacagctcactgcagcctcaaactactgggctcaagtgatccttcctcctcagcctccagagtagctgggaccacaggcatgcaccaccatgcctggctaatattttttgtagagttagggtttctccattttgcccaggctgggcttgaactcttgggctgaagcgatctgcccaccccagcctcccaaagtgctgggattatggtgtgaaccactgcgcccggtgggatacaaatttcagttagacaggaggaagaagttcaggagatcaattgtagagcatggtgactatagttaataataaattatattcttaaaaaatgctaagagagtggatgtaaattgttctcaccaccaaataataactatatgagacgaggcatacattaatttgctagatctggttattccccaatgtatacatccattaaacatcatgttgctcttgataaatacatccaattttatctgtccaaagaaaaatgccagtgggatccctgctagttgtatactggaaagggcagaaatcctcagttctttgttgtcttgagagaaagattttggctaaaatgactactttagccaaaaagagaatttattgaaggaaaatagagagaagagagttatttttattttttattttttgagatggagtctcgctctgtcacccaggctggagtacaatggcacaatctctgctcactgcaacctctgcctcccaggttcaagtgattcttctgcctcgcagcctcctgagtagctgggattacaggtgcccgtgaccatgcctggttaatttttgtatttttagtagagatggggtttcaccatgttggtcaggctggtcttgaactcctgacctcaggtgatctgcctgcctcagtctcccaaagtgctgggattacaggtgtgaaccaccgtgcccggccactgtcttcattttcagaatgttccacttagttcttcccagccccttctctcttatcccaccatcagtctgtccttccttccttctttccttcctcccttcctctctttctttcacttttttctttttctttctttgcttttcctttctctatctcctttctttttctttgtcttcctctctctttctgtatttcttgcactgtaaatttaagagtttattatttaaaaaaagttaaagctagcaaagcagtttgtaataacccaaactgggaacaacccaaatgtctatcaacagtgatttttttaatttcaacttttatttttagattctgagggtacacgtttaggtttgttacaagagtatattgcatgatgctgaggtttggggtacaaatgaatccagttagtgagcatagtacctgataggtagtttttcaacccttgccctcctccctccctcctccatctagtagtccccattgtctaatgctcccatctttatgttcacgtgtacccaatatttagctctctcttacaggtgagaacatgcggtatttggttttctaagttaattcacttaggatgatggttccagctgcattcatgtggctgcaaaacacaccaccatcagtctttcaaactcccatcccagaatgccctaaatagcagatatttaggacattcataggcagtcccttacatgctgccctggtctcaagcaccgcccctcctgccccctccccccaaggattggcccctttattcattcaatttctcttctctttccctcattcttcctccttataattcccttttcagccacccaactaatttggaagaatttccacatccagtactctcttgcatgttcagatcgctagaatccaacctctggatatcaaaggatcactactggggcttgaagactccaaatctgcagattctgaagcttgcaggtcagtggccttggactttcaaacttccagttccgtgacatccgggctccttaacttccggcttccgggagcttagtcacatacttctggcttccggattgtaggttccccgcaaggagactaaggcctgtgtgggtctttgtttccccagccgtgcaatgactgttagatgcagaaagggggaaaacagccagggaaactgctcacagtggacccccacggtggagagctggagggagagggttcttcaaacgtgtaccctagctcctttgtctgctgtctttggtgggcgtggtcttgtacttaaaatccagctgagaagccaaactctaccttaaagccgtatttcatgtttcaaactggatgatataattctggagaaatgagatgggaaactctgctgcctacttgccccttaactcttgtttatctttgggtttcttactacataccagagcttaatctttattttcttacttaatattcaaacacaacccatgagcaaattaacattatttccatcataaataaagagaatggacttaataaatttaaaaagtgaagatatgggggcaaatggatgctgccatcagctgaccctagagtttcctctgaccttccttccccaacctcgtctgtgtttcacttctgccatgtccttaaaggggctgtgtgtcccccagaccacagagtccattgcactgcacctttccttcctcctcattttccatcttacaaatcatcaatattcctggatgtaggatcatgtctgtcttatatgttttagtttctctcaatttagcattatgccttgcacgagagtataggaatacctcatttcattgcccttcacagatattgcattttttacaaattgaacgtttatggcagccctgtgtcgagcaagtctgtaggtgccattttcccaacagcatgtgctcactttgtgtccctgcttgagcattttttaggaataaactatttttaaattaaagtatgtacattaaaaaaaagacataatgctattgcacacattacagtatagggtaagcatacttttatgcacactgggaaaccaaaaaatgtgtatgacttgctttattgcaatattcacattattgtggtgatctggagtggagcctgcaatatctctgaggtgtgtctgtatgtgctcatcacatatgtgatgaatggatgaataaattagtgtagagtgaagtgcttccatgaacctgaacatcatggtctggaaactatgggcagtgagtcaaatctgacccaccatctgtttctgtacagctaagaatagtttttacatttttcaaatgggtgaaaacaaataaaaagaagaatgatattttgtgtcacatgactgatatatgaagttcaagctcagtgtccataaagttttattaaaacatagccatgatcattcatttatgattgtctatagctgttttcatatcacaatggaagttcaagttcagtgtctgtaaagttttattaaaacatagccatgatcattcatttatgattgtctatagctgttttcataccacagtggtagaattgagttgctgtaaatacctggctcacaaagcctaacatatacactatcaggctctttaagaaaacatttggcgacccctgctctaggtagactctatggggatatgggctctacactcatagggacccacatgttccaagcctccagctgtgtgttctgcttcctcaagcagcagctgactctgatattccccatctcaccttagcagtctatatcaagcaaagggcacgcagaatcccatgcacccatcatgtatgtaataaaaggcagatattatgtggtctcttgaaccagccttaggcatggaggttgaggatcaggagtgacttgagggtactgactggcagagcaggagccccgttattttggacaaacaccgccactttaagtttcagcttcatttttagccttctggatttaaggaaattacttttttaaaaactataagcagccaaaaaaagcagacagtaaaatgcagataaaacagctcgggcacagaggaaggtggaggaaaagtctcttgggtaactgccaaacttcaccctcatacaatgggccccagtaaaacagtgggccttaataagcacattcctttccctccaggtgcactaaaatagggaagctaaaagcagacttggggggtatgcctacagctgcagaaaaatgtataaaagcaaacacaccactctccctcccatataagcacaacaaaaaaaacacagaagcagtccaagcctctaagaaactctcccaccctaaatccttaaacactcttagtctgtagaaaagactctaacctaattcagccagcagcccctctcaggtgtgttttctctaaaataaacctgtcttaaccatcaagccactttttgtgtttctttcctctttctttaattcttacactgacctagtggtggaggcttggcaaggatgcctgttaccaagtgggttacttctgcactatttatagagaaggagaaatggctaaaagtagaggtaccaggttgccaacaatggttacttggggggtagcattcaaagttctccaaagcccctaaatcaatactcattgagcttatacggacaggcacagagcagtgaaaaatgtgagttgcactgggaaatgttcccagctgagttgacaaagcaatgctctgtaatgttttggttcttataaaaaggtgcccagaggatggagatggtaggtagtgtagggcagtgcaagaagctccagctctgggaccagttggatggggtttgaatcctaaccctggctcctgttagtgggatggcctcaggcaagtcacttaacattcaggatctcaatttctcttttgtaaaacaaatagaggctaggtgcagtggctcaagcctgtaatccccgcacttagggaggctgaggcctgcggattgcctgagctcaggagattaagacctgagcctgggcagcatagtgagacccacgtctctacaaaaaatacaaaaattagcccggtgtggtggtacacacctgtagtttcaaatacctggagggggactgaggcaggaggattgcttaggccttgggaggtcgaggctgcagtgagcagtgtttgtgccattgtactccagcatgggtgacaaagcaagaccctgcctcaaaaaaaattagaatctaccaggttgagttgcttttggaacttaatattatcatctatgtgagatttcatatatttttgtatttttactagagacaagatttcaccatgttgaccaggctggtcttgaactcctgaccttaggtgatctgaccacctcagcctcccaaagtgctgggattataggcgtgagccactgtgcctggccaggagcagaggtttaataggcaaaagaaagagaaaggagaacagctctttctcttgcatgggagaggggcgtctgaatgggaaatctgaccctcgtcatagtgtaccagattttatagacaggcttgagaaggcggtgtctgatttacctagggcctacccctatgtgagctggccaccccaccctaatcttattatgcaaatgagctttggctgacactatgttgcctgctttttactgtacacatggctggcaaagagaagggaacttggagccgccattttggacatgcctagtctaggtagctttttcctattggcacagctgccggcattcacccgtggaagcttccagcttgcttgtctatgtctgcagctcgattttacaggctgttctttgttagaaaagaaaatgattttgggggctgcttttcattaaatggaaaaccttactgaggacttcctacccttgctatttgcctaaatgatttctccttaactcctatatcatcaccatgcttggctaatttttaattttttttttgggtagagatggttctcactctgttgcccacactggtctcaaactcctgggcttgagccatcctcctgcctcaccctcccaaagtgctaggattacagggcatgaactgtgccatacccatcttcgaggttttatggtcatgtagaatttctgttcaaggaaagcagataacagacagggttaagggcatttgcttggaatatttaggagttttgcaggtcattcctttgaaatggaatttgttgcacatccccgatctgagattagaaacttttctgcatgttggtgtgaagacgaaagaagacagtgtttataaaatagtttatacttcaattgcctagcagtagaaacctgatttctaggaatttcggcttctgagtcaactctagctgcaagagccacttcattttcccctaaaagctccatgaaggcaggagccgtgtctctcttgatctatgtgtgagtaatcaatatttttcacatgactaaataatcaaacccgtagaactagagaacaacaaaaacaaaaacaaaaaattaagaaatccagatcgtggtgtgaacattctagtcctttcagatgttgtcggtatgaaagtcctcttaggctcgttttcctgcttcattttaagatttggaggagtctttgtaggaaggagaggctgtgaaagaggtcttaacgttctatagcttcataaatattgtgcttcagagtgaccaagatatgggccacagctggccgtccatatgctgagagtttgatgagcacattgcagggcatggaagatttccggtttctgcaggaattgaatgcctagcacgccttccataacatccttcatattgctgacatggtgaatttcttgaaacacacagaacaaagtcttttctttcccctctagatggctcaaagattgttcagattttccacgggcaaagagggaagatcttattcagaagatttttctagttaacctgaaatatatatatatgtatgtattttgttgttgagacagagtttcactcttgttgcctgggctggagtgcaatggcgcagcctcgactcactgtaacccccgcctcccaggttcaagcaattctcctgtctcagcctccagagtagccaggattagaggcatgtgccaccacacccggctaattttgtatttttagtagagacagggtttcaccacgtaggccaggctggccttgaactcctgacctcaggtgatctgcctgcctcagcctcccaaagtgctgggattacaggtgtgagccactgagctggcctgaaatatatatatatttctaaatatatttagaaacatagatatatttagaagtatatagatatttagaaatatatagatatttagaaatacatagatatttctaaatatatatatttagaaatatatagatatttagaaatatatagatatttagaaatatatagatatttagaaatatagatatttagaaatatatagatatttagaaatatagatatttagaagtatagatatttagaaatatatagatatttagaaatatatagatatttaatatctatatatttagaaatatatagatatttaatatctatatatttagaaatatatatatttaatatctatatatttagaaatatatatatatttagaaatatatatgactatagaaagaaaacctataatttccattttgaaaaagaaataagaaattagttaaataagtagattatagctgcttgtgccacaaaaataagtaactatgtgagatgatagatatattaatttgcttcacatatagataaccattttattatctatatgtatcccataacttcatgggttaaacctcaattgtgtgtatacacaataaaatttattaaaaaaaagaaatttaagaagtcttttttttttttttctttttagagacagggccttgctctgtcacccagtctggagtgcagtggcaccatctctgctcactgcaacctccaactcccaggttcaagtgatcctcctgcctcagcctcccgagtagctgcaactacaggcatgtgccaccactcctgtctcattttttaattttaattttttgtagagatggggtctcactgtatagcccaagctgctgttgaacttctgggctcaagtgatcctcccatctcaacctcccaaaaatgctggaattctaggtgtgagccaccatgcctggccaagaagtctttaatcataaggttttcttaccatatgtatttgtcagggcaacatcaaaaggccatatcagctttcattttgctccatcctgttctttctcagaagccccatctttgtatgcctcctaaaccccaagttaccaaagttaagaggaagtaaatgtgttgcagtaaagtatctatctgggccaggtgtggtgactcacacctgtaatcccagcactttgggaggccgaggcgggcagatcacttgaggtcaggagtttgagaccagcctggccaacatggtgaaaccctgtctctactagaatacagtagtaataataataatcaattagctgggcttggtggcaggcgcctgtagtcccagctactcgggaggctgaggcaggagaatcgcttgaatctgggaggtgggggtcacagtgagccaagatggtgccactgtactccagtctgggcgacagagtaaaactccctctcaaaaaaaaaaaaaaaagttgtatctgaagtagggtgattatagttaacattaatctaccatacatttcaaactagctagaagagaataatttgaatgttattagtacaaagaaaagataagtatttaaggtgatagatatcttagttaccctgatttgcttatatgagtgtagcaaatgatcacatgtacctagaaactatgtacgtctattatggatcaattaaaaaacatttaaaaagatctatctgtttccaaatgtatgtcttgacctcggagctccagggtttgtgtaatgttgctttaaatgtggagtcataaaagaagccaggtgggaaattaatgaaatgttagaagtgttatctattgttaaccacataagatttaaaggaaaaagcactgaattccttttttttcccctgagacaggggtcttgctttgttgcccaggctggagtgcagtgatgggatcatagctcactggatacttgacctcctgggctcaagcaatactccaatcttagcctcccggtagctgggactacaggcatgcaccaccatgcctggctaatttttatactttttgtagaaacggaattttgccatgttacccaggctggtcttgaagtcctgagctaaagtgatctgcctgcctcggcctcccaaagtgctgggattacaagcgtgagccactgcgcccagcctgaattccttttttccatatcttttccatctccaatatgagttatttattcctaggttcataggaaactcagtgtaatttctatggttcgagatggtcagcttcacttgcttatatagttagtatttaatgcataattaatatgtgctcaagagattaataaatattgtgcttcaggagattattcagtagtgatcacaagacattttgtttttatgaaacaagactgcagaaagccatggcagagactgcagaataagagcaagacacacattttcttttcttttcttttctttttttttttttttttgagacatagtctcactctgtcacccaggctggagtgcagtggctcgatcttggctttactgcaacctctgcctcctgggttcgagtgattcttgtgcctcagcctcccaagtagctggaattacaagcatccaccaccatgcctggctagtttttgtgtttttagtagaggtggggtcttgccatgttggccaggctggtctcgaactcctgacctcaagtgctctgcccgccttggcctcccaaagtgttgggattacaggtgtgagccagcgtgtccggccaaggcacatacattttcaaacaccagagataacaagttttaggaaacagtagaagataaaatgacattaagtaatgcaatggattttcttggtcctttgtcagtagctggtagaaatatctgatcacacaccttaaatttcagaagcctttgttggctatctgatgacctaactctaattccctacacaaaagtacatgtttcctttcttcaatgtgtatatatcatttctagtggctgtgtggggtgaaagggtgataaatatttatgcaaatatctacaatatgaggcaggttttgatgattctacaataggtaaacccaaactatatgggtatgagagacagaataatgaccccccaaagaggttcacatccctaatccccagaacctgtaaatgctacctgacatggagaaagagactttgtagatacggttatgaaaaggatcttgagatgggaaaattgccctggattgtcttggtgaacccaatgtaatcatcaaggtctttataaagtatgaaggctgtaggagagtcaaagacagggatggactgggcgcagtggctcacgtctgtaatcccagcactttgggaggccaaggcgggcagatggcttgaggccaggagttcaagactagcctggccaacatggtgaaaccctgtctctactaaaaatacaaaaattagccaggcgtggtggcgggtgcctgtaatcctagctactcgggaggctgaggcacgagaatcacttgaaccctggaggcagagtttgcagtgagcccagatggtgtcactgcactccagcctgggtgacagagcgagtgagactctgtctaaaaaaaaaaaaagaggatggacagtcaataatatgggaatgtggaaggtggatggtcatgtttggttgtatgattgagagcatggagtttacaatgtgtcatcatgatgacttggatttgtgtgtgtgtgtgtgtgtgacataggtggtgagggcatttagtgagaacagaaaaggaaatagaagatcctgtgttggaaacagggattgtgcaggttggatgaaaaaggtaatgaggccaggtgtggtggctcacgcttgtaatcctagtactttgggaggctgaggcgggcagatcacctgaggtcgggaatttgagaccaacctgaccaacatggagaaatcccgtctctagtaaaaatacaaaattagccaggcttggtggcacatgcctgtaatcccagctacttgggaggtggaggcaggagaatcgctttaacccaggaggcggaggttgcggtgagctgagatagcaccattgtactccagcctgggtaataagagcgaaactccgtctcaaaaaaaaaaaaaaaagaaaaataaaaaaggaaaaaggtaatgagagaaatgcaaatgtggaaaaagtgcctggcagcatggtgggcttcttttcaagactttaaaaaatttattatttatgtatttactttacacaaggggtcttgctctgtcacccaggctgtagtgcagtggcataatcgtagctcaccgtggccttgaactcctgggctcaagtgatcctcctgcctcagcctcccaagcagctgggattataggcatgcaccaccatgcccagctagtttttatattttgtgtagagatgggattttgccatgttgcacaggttggtctccaactcctgggctcaagcgatcctctcgcctcccaagtagctgggactacaggcatgtgccaccacgcccagcgaatttttaaaacttttttatagagatggggtctcgttacattgcccaggctgaataggctgttttttttttttttttttttggcagagtattgctgtgttgcccagggtggagtacagtggcatggggcaatcttggctcaccacaacttttacctccccggctcaagcaattcttgtgcctcagcctcctgagtagctgggattataggtgtgcaccaccatgcctggctaatttatgtatttttagtaaagatggagttttgccatgttggccaggctggtctcgaactcctggcctcaggtgatttgcttgccttggcctcctgaagtgctaagattataggtatgagccacggtgcctggccctgaatgggctctttaaatgtgaagcaagactcaagaggcctaaatctcactggctgaagagactctgtacatttcttttttttttttttttttttttgagacagagtctcgttctgttgcccaggctggagtgcattggcgcgatctcggctcactgccagctctgcctcctgggttcacaccattctcctgccacagcctcccgagtagctgggactacagtcgcccaccaccacgcctggctattttttttttttttttgtatttttagtagagatggggtttcaccgtgttagccaggatggtctcgatctcctgactttgtgatccacctgcctcggcctcccaaagtgctgggattacaggcatgagtcactgtgcctggccgagactctgtacatttgacacaaatccaagtagtcttactttgctcatcagtgaaatggggttagaattacacatataatctggagaagatggaagaagaggtgagaaaaatacaacagaactttgtatgtctacattaataaatgttggttattagtcatcaatgtcatgaattatcccatgccattgaggcataggataatatggcttcaagtgatccccaagttgtcccgggctcaagtgatcttcctgctttggcctcccagagtgctggcattacaagcttgaaccactgttcctggctgatttataaaaaagcatttaaactgagatcattgctaatggttaatgagtcaaggagtcgctcaaatgtgaaccctcttagggcatcacccgctgattcccaggttgcccagtgtgtttttaaaactttatttatttaattttgttatttgtattattttctagagaagaggtcttgctgtcatccaggctgaaatgcagtggcacaatcatagctcactgcagcctcaaactcctgggctcaagtgatcctctcacctcagcttcctgagttgctgggactacagatgcacacaaccaccctcagctaatttttaaatgctttatagggacgaggtgtcactgggttgctcaggctagtcttgaactcttggcctcaagcagttgtcctgcctcagcctcctaaagtgctgggattacaggcatgagccaccatcgctggccccattactgcttttctttctgagttttgcagtgggtagagggtgctgagtagaggcactgcccactacccactactaagtggtagttggtagaggcagacttgttaagaaagcctaaatcccagttaacacttatttctgtttaattcataaatatgtacagcatttcctcccatgcttgccttattgggtggtggtgccaagtgactgtgagatagacttgtatgtagaggaaagggatagggtaaatgcttctaggtagaatgtgcatcactgcttcagatcaattcctgctcatttagttaaccatgcatggcacatagtaggtgtccaataggagtgtttgtgtgtgagagtcaaactaagcacagttccctaaggagtaagagccaaggattttttttttttttttaatttttgggatagggtctcactctgttgcctgggctggagtgcagtggcatgatcatggctcactacagcctcaacctactgggctcaagtgattgtcccacctcagcctcccgaggagtagctgggactacaggtgtatgccaccatgtctggctaatttttatttttattttttgtagagatgggatcttgctatgttgcccagggtcatcttgcactcctggcctcaggtgatcctcttgcctaggcctcccaaatgctgggatgacagtgatgctgggatgacaggctatgactgattaaaaaaaaacatttaaactgagatcattgctaatggttaatgagtcaaggcgtactcagatgcgagcctttctagggcattgcctgctgtattcccaggtttccttgtgtgataggcacatgctcctcaggtgggtcggttagtgaagtgctctggagcaatgcgtgatcttaccgtgctgggtttggaggtgtcagccttagcactgctggagagtgtgtgcatctcagactcagttttcaatttcctgatccctttggaccatttcccatattgctcccggacctgcagaggcaaagtgtgtactgggtcagctcacagagagcagtgaggacaggaagagtcctgggtgggagctgggcagtggtacctgctggctgaggaggcagtacaccaggaagatgaagacaccctgcaggctgttgatgatggtgaagaggtaggccatgacccgggcagccggacccacctgcaagatgcccagacaccacgtgcagcccaggatgaacagctgagctgtcgctttaaatgccagcatcctggattgagtaagaaaggaggctggtgatgcacccagagaaagagaatcaaggctatttcatctgtgcccatggagtcccctgccctcccctgtagatgatttctcagactgggctgtggtcagcttagatatttactgtcaactatagcccacagtagaaatgccacctggggttggccacggtggctcatgcctgtaatcccagcactttggggggccaaggcaggcagatcacctgaggtcaggagttcgagaccagcccgaccaacatggtgaaacctggtctctactaaaaaaatacaaaaattagccaggtgtggtcgggggggcgcctgtaatcccagctactcaggaggctggggcagtagaattgcttgaactcaggaggcggaggttgcagtgagtcgagatagagccactgcactccagcctgggagtgacagagcgagactctgtctcaaaaaaaaaaaaaggattatttttgaatatgcaaagagatttctgtgttcatgaactacacagtctcttcaaatcaccaatacaaccaggcatgacacacaaaatttggaaaggataatgataggaatctagaagaaagttcattaattttgcacaagggtgcctggaacaacaaactgctcaaaccctgtagaggaattatttttatttttatttatttatttttttgagatggaatctccctctgtcacccaggctggagtgcagtggcgtgatcttggctcactgcaacctctgcctcccaggtgaagtgactctcccacctcagcctcctgagtagctgggattatagacgcccaccaccatgcctggctaatttttgtatttttagtagagatggggtttcaccatgttggccaggctggtcttgaactcatgacctcaagtgatccgcctacctcggcctcccaaagtgttaggattacaggcgtgagccaccatgcctggcccccgtaaaggatttaatgttgattaggattttcccagagggaggattgcatgagaagtgatgaggagcctgaactgagggtacggtatgaaggtgcagactgggctgtgggaacaggcaagaaaatgtacgtgttctttgcacttttttttttgagttggagtcttgctctgtcacctaggctggagtgcagtggcgcaatctcggctcactgcaacctctgcctctcaggttcaaacaattctcctgcctcagcctctggagtagctgggattacaggcacccgccaccacgcccagctaatttttgtatttttagtagagacggggtttcaccacgttggtcaggctggtctctttggccaggctggtctcgaactcctgaccttgtgatctgcccccgcccctcagcttcccaaagtgctgggattacaggcatgagccaccatgcccggccttctttgtgcttttgttataggactgctgacaaaagtccaaagaagtttttaaccttttagtttattgattcgtaatgtttgtacatctttgtggggacatatgtgatattttgttaacatgcatagagtgtgtcatgattaagtcagagtatttggggtatccgtcacttcgcgtgtctaccatttgtatgtgttgggaacacttcaaattctcccctctagctattttgaaatatacaacatattgtgaactagagtcaccctactctgccatccaatattataacttattccttctatctgactgtatgttgtacccattaaccaacctctcttcatcgccttgcccactcacataccctttccagactctggaatctatcattctactttatttttatttttagtttttgaggcagagtctcactctattgcccaggctggagtgcagtggtgtgatctcggctcaccgcaacctccgcctcctgggttcaagcggttctcctgcctcagcctcccgagtagctgggactacaggtgcctgccaccatgcccggctaacttttatcattctactttctgcctccacaagatcagcttcttcggctcctctctatgtaagtgacaacctgtggtatttgtctttttgtgcctggcttatttcacttaagagagtgacctccagtttcatccatgttgctgcaaatgacatggtttcattctgttttgtgatcgaatcgtatcctattttgtatatataccatttaccagtcaatgaagattcttcctgttgctctgggattcacaaactgagattagacatggacaaaacatgttgcatggggtctcaacaggataccactgaatctgtgatggctgccatagaaggatggctgcgtctgttttttctgggtcccttcaaaagaccctgagaagggacctcagtggctgctgaggcacatggcttggctcttgggaaccatacatgtctgtgtggttatcacccccttctccatcttaccttgtgttccggagggtggacacttcactattgagggaggagagtctgtttttcaaaatccagagagtcaccagaaagagaactaaattcaccttcagaaaaccacagaagatttgttgaatagattttgaaacctgttatctctttttttttttttttcagacagggtcttgctctgttgcccaggctggagtgtggcggtgcaatctcagctcactgccacctctgcctcccgggttcgagcgattctcctgtctcagcctcccgagtacaggcacccaccaccacgcctggctaatttttgtatttttagtagagacagggtttcaccatgttggccaggctggtcttgaactcctgacctcaagtgatctgcctgcctcggcctcccaaagtgctgggattacaggcgtgagccaccacaccgggcctgaagcccattatctcttcatcctagcctgtctaatatgaattatacacgtaagtctttttcttaaatattgagtaacagtgttgagtttgaagattcaagagtggtcttaggaaacctaacccaacccatgacaacccaggggacattcctgctcttgtcaccatctttattatcttgtttttctaatgaccctcagcggggcagcgaggatgctcagatgatgtcactcacagagaagatggcgcagacaggtccaaggaagccccatataaatcccttttctggttggagccagcagctgaaaaaagagagattaaaaaaaatgcatcagtttttggagatatggaacagttatgtaaatctattccatccctcctcaccacttcctcacttccttcctacgtcaacaatattaagtgtttctttagtgatagggtctgtggttggctctgaagatacagtggtggagaaaatgaacacggtcttagatccccaaaatttcaactcaaggaagatacacacaatcagacacattcaaacaatgaaacaaaaatggaaggttgtgccaggcacagtggctcacaccaggactttgggaggccgaggtgggaggattgcttgagaccaagagcttgagaccagcctgagcaacatagcaagaccccatttctacaaaaaataaaaaaatagccgggtgtggtggctcacacctgtattcccagttacttgggagactgaggtgggaggatcgcttgagtccaggaggtcgagactgcagtgagctgtgattgcactactgcactccagcctgggcaacagagcaagacctatattgcagcattttaaaatggctgaatgaggccaggtgcagtggttcacacctgtaatcccagcactttgggagccgaggcgggtggatcatttgatatcaggagtttgagaccagcttgcccagtgtggtgaaatcctttctctactaaaaacacacaaaaaatgagctgcgtgtggtggcgcatgcctgtaatctcagctactcgggaggctgaggcatgagaattgcttgaacccaggaagcagagagcagaggttgcagtgagccaagatggcaccactgcactccagcctgggtgacagagtgtttctaaataaataaataatgactgaatggtctcttaacgttcctttttatggctgaataacatttcattgtggatatattacgttttgtttattcattcatcagtgataggcattgtttccaatttttgactattctaaatactgcttctatgagcattcatgtacaacatttttctaaacgtttattttaggttcagaggtacattttgtaggtttgttatgtaggtaaaatgcatgttgcggcggtttggtgtacagattatttcgtcaccctggtcatcagcacagtactctataggtcgtttatttatcctcgccctcctcccactctccaccctcaagcaggcttcggtgtctgaagtttccttgtttgtgtccatgggtacccaatgtttagctcctacttataagtgagaacatgcggtatttgattttctgttcctgcattaattcacttagaataatggcctccagctccatccatattgctgcaaaggacatgatcttgttattttatttttttgagatggagtctcgctctgtggccaggctgaagtgcaatggagccatcttggctcactgcaaactccacctcccaggttcaagcgattcttgtgcctcagcctcccaagtagctgggattacaggcacccacgaccacgcccagctaacttttgtatttttagtagagacggggtttcaccatgttggccaggatggtctcaatctcttgaccttgtgatctgctcgcctcggcctcccaaagtgctgggattccaggtgtgagccaccgcacccggccgatctccttattctttatggctgcatcatgtacaagtttttttgtggacatcgttttcatttgttttgggtatatacctgggtcatatggtagctctatggttaacttttggaggattagtgttaatagttcacaaaaccaaaaacggaaaaagaggaagcactttccaaatcttctacgaggccagtgttactctgacaccaaacccagaaatagacatcacaagaaaagaaaactgcagaccaaaatcccttatgaaaatgaatgcaaaaatcctcaaaaaaatactagccgaccaagtcctgcaacatattaaaaggattatataccctgaccaggtggtaattatcccaggaatgtaaggctagtttaacatctaatcatccatcaatgtaatacacatattaatagaataaaggattaaagttatatgatcacattatagttatataattatgtaatcatataattataagatcacattataattatataaccatataattagccatatataaccatataatattccccaggactcaaaggtaaataattaatcatatataaccatataattatataaccatataattataatgtgatcatataattttaatcctttattctattaatatgtgtattaataaaataaagaattaaggaagcatataattatgcttatataattatatgtaattatatatgatatatacatatataatataattataatgatatgataatatatgattatacaatttaatgtgatcatattatttatagttatataatataattatttatagttatataattatttatagttatgtaatataattatttatagttatgtaatataattagttatgtaatataattatttagttatgtaatataattatttatagttatgtaatataattatttatggttatataattatttatagttatgttatgtaattatttatagttatataattatttatagctatgttatataattatttatagttacataattatttatagctatgttatgtaattatttatagttatataattatttatagctatgttatgtaattatttatagttacataattatttatagctatgttatgtaattattcatagttacataattatttatagctatgttatgtaattattcatagttacataattatttatagctgtgttatgtaattattcatagttacataattatttatagctatgttatgtattcatagttacataattatttatagctatgttatgtaattattcatagttacataattatttatagctatgttatgtaattattcatagttacataattatttatagctatgttatgtaattattcatagttacataattatttatagctatgttatgtaattattcatagttacataattatttatagctatgttatgtaattattcatagttacataattatttatagctatgttatgtaattattcatagttacataattatttatagctatgttatgtaattattcatagttacataattatttatagctatgttatataattatttatagttatataatattaatatataaattacatagatatatatttatataaaaattacatataaaataatctaatataattatataattatatgattatctaattatgtgatcatataatttttaccccatataattaaaaattatatgcttcggaaaagcatttgacaaaatcaaacactctttcttcatcaaaataccgaacacatgaggaatagaaaagaatttctttaacctgaaaaagggtatctatgaaaaatcctcagctaacatcatacattaatgaggacagagtcaatgctttctccctaagtacaggagcaagacaaaattgtctgctgttctagtcaacagtgtcctggaggtttcaaccagtgcaattggcaaacaaacaaacaaacaaactagctagaaaagtacctggcacaaagtaagcatctcataaatcttaactatgacaatatcaattattttagttattcaaatcaggtctactttttcaaatgaaaaattggagtatcctaaaagatttagataaagtaggttagatttttaaaaaatgctgtcttgagcactttgatttcattcttactatttcagtgagacagatttaaatgcattatccctaactattattattattttttagagacaaggtctttctctcttgctcaggctggagtgcagtggtgcaatcatagctcactgcaacttcgaactcctgggctcaagcgatcctcccacctcagcctcctgagtagctaggactacaggtgtgtgccagtaggccctgctaattttttaaattttgtaaagaaggggtcttgctgtgttgcccaggctggtctcaagatcctgggctcaagtgatcctcctgtgtcagcctcccaaagcacagggattccaggtgcgagccactgagcctgaccctccttaattattataatcttctagcagaaagatgccctagggattatgacatagtgtctttgtcctattcgtgctttccaaaggcttgccctttatttcattcagaaaatttccgaaaaccctcttctacaatgcctagcttgaaatgtaattgaaataaactcaatagctaagaataaggagctgcagtgtaatccaaccaatagagcctaaaatccctactgatctaattaaaagcaggtgtcataaaaatgctatctaggttctagcaatggccatggttatgccggagaagataaggattgtgagaatttgcactaaccgggaaggtgttccataaaggtgaggcctggaggctgcagaaatggccactgtcacagctgggactccgtagcccacagggaacatgagcttcttcatgaatctgttgatgcttgagtagttgaccaccgtcaggttccgtgcagtgaggaagaggtacagggcctccagcagcatccaggtcaaggtggccaggtagagatagtgcaaggtaccggcgatgatggagcacagcacctggcggagaagtaaaagacgcccagagcggcgatcagatttgagtgtggcccatggcttctcctgtaccatgttgttggggagaattctgagatatttgatggcattatagagaatatttgctgtgtagttgagtcaggcaatgggaaattggtggtgttctcttctaatattccccaggactcaagggcctatatatatatacgtgtatatatacgtatacacacacacacacacacacatatatatatatatatatatttttttttttttttttttgagacggaatttcactcttgttgcccaggctggcatgcaatggtgcgatctcggcttaccacaacctccacctcctgggttcaagagattctcttgcctcagcctcctgagtaactgggattacaggtatgcgccaccatgcctggctaattttgtatttttagtagagacggggtttctccatgttggtcaggctggtctcaaactcccgacctgaggtgatccgcccacctcagtctcccaaagtgctgggattacaggcatgagccaccacgcccagccgggctattatattaaggaatcaaatgccgcatcattccatgagccagcgtgtcctgcgtcaaggaagggagccctctggaacaccgctgtcaataccttgtgtccggtttgatcaattgccacgaggaagaggaggtgggccaggaagaggcagagcgagagctgcagatgcagtgaggtgctggtgttctggatggctttacacaggagaaaagtgagggccgccaggaggaggcacagcagagagacgctcagccccatgtaggtgatgacagtcagcacgggatcctcctcctgggacccggaaaagaagagttcacagtgatgctttcctgctctggggtaatgaccccaccaccatttaaaatttttactttggcatagcacattcaagaatgagggagccaggtaaatttgtgaagatgtcaccaatttaatttaatttgcgaaggtgtcacccgagcctcatgggtggctaggaatacaggcgtagtcatgtaggtgacaacgggtgtgcattatagtcatgtatggcaccatgccctgctaatttttttttttgacagtcttgctctgtcgcccaggctggagtgcagtggtgcgatctctgctcactgcagcctctgtctcctcggttcaagcgattctcgtgtctcagcctcccaagtagttgggattacaggcacgtgcctccatgccaggctaatttttatacttttagtagagacagggtcacaccatgttggccaggctggtcttgaactcctgacctcatgatccacccgcctcggcctcccaaagtgctgggattacagtcgtgagccaccacacccgtcctaattttttttttatttttgtagagacagggtctttctgtgttgcacaggctggtctcgaattcctgggctcaagtgatcctcccgtttcagcctcccaaagcacagagattccaggtgtgggcccgttaggttttgaagggaaagtgagagttaaagaaagacagagagttggcagctctacagcaatgcaggtttatgtccagcaggagacttgtggaggggggagctagcttcgtgccagaacccactgccgcttacaggctggggtaattacaggtctgggcgggaggggctgggcggtatggcttgctgcctgggaggatattgataagatgttcctgtcatggaaaacaaaagggtggtttggccctttctcccgcaggatatgatgatgatgtcccttggatctactctaagtgatgagataagaaagtcaggtgggcgaggtgtggtggttcctgcctgtaataccagcactttgggaggccgaggcgggtggattacttgaggtaaggagttcgagaccagcctggccaacttggtgaaaccccatctctagtaaaaatacaaaaattagccgggcatggtggtgcatgcctgtagtcccagctactcaggaggctgaggcaggaggatcccttgaacccagaaggtcaaggctgcagtgagctatgactgtgccactgcactccagcctgggtgacagagaccctgtctaaaaaaaaaaaaaaggcagagtttaccctgggtgggccagacctaatcagatgagtctttataagctctgggctcttcctggagaatcagattcaaaacttgtgacggttaatactgggtgtcaacttgattggattgaaggatacaaagtattgatcctgggtgtgtctatcagggtgttgccaaaggaaattaacatttgagtcagtggactgggaaaggcagatccactcttaatctgggtgggcactgtctaatcagctgccagcgtggctagaatataagcaggcagaaaaatgtgaaaagagagactggcctagcctcccagcctacatctttctcctgtgctggatgcttcctgcccttgaacatcagactccaagttcttcagttctgggactcggactggctctccttgctcctcagcctgcagacggcctatcgtgggaccttgtgatcatgtgagttaatacctaataaactcccctttatatatatctatatctatctatatatatagatctctctctatatatctctatatatgtatatatttgagtcagtgggttgggaaaggcagatccactcttaatctgggtgggcaccatctaatcagctgccagcgtggctagaatataagcaggcagaaattatctatctatctatctatctatctatctatctatctatctatctatctattccattagttctgtccctctagagaacctcgactaatacaaagcttaagagggattctgcgtgaggaaatttttttccttgtcctccagataggaatgctagaagtttgccagagggtcatgtgagaagggatatgagtggcctctaggaactgaatgtgatgccttcctgacagctaagaaagtgagacttcagtcctacaatcacaagaaactgaattctgccagcaaccagggagcttggagaaggacctcaagtctcagatgaaatggcagccctgggggtggggtgacatgatgatttcagtcttgtaagaccctgagcagaaaagccatcttgctatgccagcttgctgacccagagctgtgagataatgcatatatttttttaaaaggctgctacgtctctggggatttgttacacggcaataaatgcagagtgcatcccctcctaagggtctcacctgcacatcgtagtgggccatgaggacggcaaagctgctcaggtgggtgcaacggcagatggtgctggtgtctctggtgcctattgtgctgcagcctgtggtggcccagtgaccacatccattctggccatgctcccagaagacacagagcaccttctgtctcgggatcactgactgcaggaacagaacacaggtgtgggctgggcatggtggctcacgcctgtaatcccagcactttgggaggctgaagcaggtggatcacttgaggtcaggagtttgagaccagcctggccaacatggtgaaaccccatctctactaaaaaaaaaaaaaaaaaaaaaaaatacaaaaattagctgggcgtggtagcacacacctgtagtcccagctattagggaggctgaggcaggagaatcgctcgaacctgggaggcggagactgcagtgagctgagatcgtgccactgcactccagcctggctgacacagcgagactctgtctcaataaaaaaaagaacacaggtgtgagctggtgggtcggatgctcagaaatgcttacccaaagccggcttgggaaggactgactttcctggggagataatgtacccataacagagacccctgagccccagggctgagctgagcagcaaggctatgcccggactcagactattcacccaccaaccaactccaccagcactcacacggtgggagaaggtgaaggtaactggggagctgaggttttgggtgtcgttgttgctcagaaaggcagagatcacatctgagagcaggatgggggagccgtcctgcagcaagccctggtgtgtctcatgcagaagcatctgcttctcaggttccaggaccagaggggcctcagccagcaacttgcccatccctggaatggagacaaggcccaccacagaagggcctgcagggcgaggccaaggttgaatcttggagtaggttgaatctctgggtccacaccagagttcctctgccctgcacagaactttctactcagatgggctaccttcctttggcttcacccctcccacactttccttcaatctttagttctatgtgtatcacatcctgcaggacaaggccacggttaatatctcagggtccccaacaaggtccgttcctcctcagctggactctcctcttacagccccactccaaacatcccacacttccctttaatctttaaatttcttatttttcacattcttgggcatcttttcccaccatgaagcttcactgaccacctccccatctcagccattacctgggtcaccagatttctgtgcctgattccagtcgagctgcatcactgcctgattctgtctcaaggtgacactcctgtctacttgcttctgcacctccagggacaattctatgagttgtgggaattacataaggggggttaggttaggaatcgtgcctgcagtggttgatatactatgacttaatatatatactatatacatatatagtctgaagttacaaaatatcggaagagaatagtgtgagcaactgtatatctacaaagtaggtaacctagatgaaatggacacattcctagtgacacacaaaccactgaaatcaactcaagaagaaatagaagatctgaacagacctataacagattaaatcagtaatcaaaacctctcaaaactaacagcccagaccagatgacttcactggtgagttctaccaatagcttaagaaagaatgaacatgaatcttttacctttttaaaaatatggaagaggaggaaacactatttaagtaattttatgagtctaatattgctctgataacaaaaccagatgaagacatcacaagaaaataaaattatagaccaatatttcttatggacatagatgcaaaaattttcagcaaaaatgttaggaatacattttacgaaggagactcaagacttataggaaagttttttgagtatttttttttttttgagacaaattctcacctgttggtcaggctagagtgcagtggcatgatcatagctcactgcagtctcctgggctcaaccaatccttccacctcagcctcccaagtagctggcactacaggtgctcactaccacagccagctaatttttaaattttttgtggagatcatgtttcagtatatttccaaggctgggcttgaactcctgggctcaagcaattctcccaccttggtggcctctgacaatattgggcgtgagccactgcttctggcctacaaaagtgtttgaaagaaataaaaggccctctctaaatggaaagacagcctatgttcatggattggaagactttctattgttaagataacaatactcccccaaagtggtctagagactcaatgcaatccctatcaatattttagcctattattactttgcagaataagaaaagttcatcttaaaattcatatggtgttgtaaggaatccaaatacccaaaaacaatcttgaagaagaacaagaaggttggagaattcacactacctgattccaaaacttactacaaactgacagtaatactggcataaggacacaacagaatagaattgagagtccaggaataaacccatccatcttatggtcagttgattctcaacaaggggtgccaagactatacaatgggggaaagaataatctcttcaacaaatagtgctgggattactggatagtaacatgaaaataaggaagttttaaccctaccctcacacaacaaacaaaaattaactcaaaataagccagtgacctaagcttagaagctaaaactagaacacttaggaggaaacaggggtaaatcttcctggtcttggatgcggtaatgaattctttttttatttttatttttgggacagagtcttgctctgtcatccaggctggagtgtagtggcacaatctcagctcactgcaacctccgtgtcccaggttcaagcaattctcctgcctcagcctcctgagtagctaggattacagtcatgtgccaacacatctggttaattatttttatttttatttttagtaaggacagggtttcgccttgttggccaggctggtctcaaactcctgacctcaggtgatccgcccacattggccttccaaagtgctgggattacaggcgtgagccaccaccccctgtcaatgaattcttaaatatgacaccaattgcacatgcaacaaaagaaaaattagataaaataaatgtcttcaagatttaaaacttctattcattaaagtgaaaagacaagaaaatgaaaagacaatctacagaacgggagaaaatattttgcaaatcattcatctcagatgatctactatcagaatgtttaaagaatgcttacaactggacaaccaaaagacaaacagcacaattaaaaataggcaaaggatttgaatagacatttctccaaaaatgacatgcaaatggtgagcaaacacatgaaaagatgttaaacatcattagttatcagggaagggcaaatcaaaaccacaatgaggtatcatctcactagtgaagtggtgtaaatacccaagtttcactgtttcacaccagggaaattgaggatgtggacacataagaagttagtttaagagtggagatttaataggcgaaagaaaaaaagaatagctctggctgggcgcagtggctcacgcctgtaatcccagcactttgggaggctgaggcgggaggatcacgaggtcaggagatcgagaccaacctggataacacggtgaaaccccgtctctactaaaaatacaaaaaaattagctgggcatggtggtgggcgcctgtagtcccagctactccggaggctgaggcaggagaatggcgtgaccccgggaggcggagcttgcagtgagccgagatcgcgcccctgcactgcagtctgcgggacacagcacgactccgtctcaaaaaaaaaaaaaggaaaaagagaataactccctctcctgcagagagacaggggctcccaagtgggtcttccggttgcgtggtgaaatgcacgaagttttatagatgagcttgggtaggcggtgtccgatttacataaggcttaaagattggtctgaacaggtgagccatttacatacagcatgaagaaactggctgccccagcctaatcttttattatgcaaatggattctctacctggctggctccacgttgcctgcttctgtactgtacacgtggttgacaaagataaaggaagagggagcccccacgttgaacatgtcgggcccccaggtaaccttttcctattggcacagctgccggcattcacccgtgcaagcttccagcttgcttttctatgtctgcagctcgaattttcaggctgctcgttattagaaaagaaatgatttgggggctggtttttattaaaagggaaaccttactgaggactctctgacccttgctaactgcctaaataatttctttttcactcctgtatcactgggatgaagagaggtgagttaacaggtagagacatacagttagacaaaaagtataagttatacatatatatatatatattttttttttttagacggagtctcactctgtcacccaggctggagtgcagtggcacgatctcagctcactgcagcctctgcctcctgggttccagcgaatctcctgcctcagcttcccaggtagctgggattacaggcacgtgtcactaagcccagctaatttttgtatttttaatagccagggtttcaccatattggccaggctgggctcaaactcctgatgtcaggtgatctgcctgccttgacctcccaaagtgctaggattacgggtgtgagccaccaagccagccacctctccgcttattaagcagatttttttttttttttttttttgagacggagtctcactctgtcacccaggctggagtgcagtggcaccatcttggctcactgcaagcttcgcctcccaggttcacgccattctcctgcctcagtctcccgagtagctgggactacaggcacccgccaccacgcctggctaattttttgtatttttagtagagatggggtttcaccctgttagccaggatggtgtcgatctcctgacctcgtgatcctcccacctcggcctcccaaagtgctgggattacaggcgtgagccaccgtgcccggcccaagttctattgtttgacagcagagcagagtgactataattaacaagactgtatgatgtatttcaaagtagttacaaaagaggacttcaattgttcccaacacatacaaatgataagtactcaaagtggtggatacctgagataccctgacttgatcgttacacattctaggcaagcaacaaagtatcacatgtacccataaatatgtaagatttatgtatcaataaaagcaattaaaaacagaacaaaagaaaacggaagtaacaagttttgctgaaggtgtggagaggataacccgtgtatgtttctggtggggaattagaatgatgcagctgctttggaaaaagtttggtggttcctccaaaagctgaacatagaattaccatatcacccagcaattccactccttagtatataccccaaagaactgaagacagttattcaacccaaaatgtgtccactaatattcataagagcactattcacaccagccatctaaacaaaaaaaaaaaattcgaagtcctctcccgcccccctcaaaaccatctgaatggacttcctttttggccagggcactctaaatttaactggaaagactagttcaggctatggtgggaagtggggggtctgacatgtgtcatgccctcctcccttttggagttgaggaaaagctgaccagcatttaacataacacagacctgaagcttaataaggaacatttaccatctattctctctgaagcctgatacctgaagagttcatctggatgatacaacttcagcctttacagccccttatcgtattccagacattcttttctatggataataactccttcaaccaactgccaatcagaaaagcttaaatctacctataatctggaagcacccgccccacacctccacttcaaattgtcctgcatttctggactgaaccaatgtatagcttaaacatatttgattgatgtctcatgtccccctaaaatgtataaaaccaagttgcgggggcaggcgtggtgtctcacgcctgtaatcccagcactttgggaggccgaggcaggcggatcacgaggtcaggacatcaagaccatcctggttaacatggcgaaaccctgtctttactgaaaacacacaaaataattagccgggcgtggtggcgggcgcctgtagtcccagctacttgggaggctgaggcaggagaatcgcttgaacccgggaggtggagtctacagtgagccaggatcgcaccactgcactccagcctggttgacagagcaagactctgtctccaacagaagacaacaacaacaacaatcacaacaagctgtaccacgactaccttgtgatatagaagttaaaaaggaattatttaggcagagagtgtgggtaaggaagtcctgggtaagtctttccttttaatgaaaatcagcccctatatcattttttttttttctaacaaagagcagcctgtaaaatcgagctgcagacataggcaagcaagctggaagcctgcacaggtgaatgctggcagctgtgccaataggaaaaggccacctgggactaggcatgttgaaaatggcggctccatcttcccatctctttgccaaccacgtatacagtaaggagctggcgaagactccatttgcataataagattagggtggggcagccagcttccctgcaccttatgtaaacgtcacacctgttccaaccaatctttgggccctatgtaaattagacactgcctcctcaagcctgtctataaaatccggtgccctctggcatgggtgggaagtcccatttgggcattcctttctctcacaagagagagagttgttctcctttctctttcttttgcctattaaacctccactcataaactcactcctggtgtgtgtctgtgtccttaattttcttggcatgaggcaatgaacctcaggtattaccccagaaaacaacaccacttcacttgggaatatgttctcaggggctcctgagggctgtgtcacgggccatggtcagtcatacattcatatttagctcacaataaatctcttcaaatattttacagagtttgactctttttgtcaacagccaaaaggtggaaacaacccaaatgtccatcaatggatggatggataaaaaaaaaaaaagtgatgtattcatacaatagaatagtattcagccatgaaaaagaatgaaatattgataaatgctatggcatgcatgaacctcaaaaccattatgctaggtgaaaggagctagactagatggtcacatattgtatgattccatttatgtgagatatcctgattaggaaaatccatggaaacagaaagcagattagcggctgccatgggttggaggaagggaggaatgaggagtggttgcttaccatgtgcagtgttcacttttgggctgatgcaagcattttagaaatagaggtgacggttgtataactttctgaatatactagattctaccgaaacacacgcttttaaaattttttcttatttttatttttaattttaatttttttgtttgagatggagtggcactctgtctcacgtagtctggagtgcagtggtgcaaacttggctcactgcaacctctgcctcccaagctcaagtgattctcctgcctcagcctcttgagtagctaggattacaggtgtgcaccaccacgcctgtctaatttttgtattttcagtagagatggggtttcactatgttggccaggctggatttgaactcctgacctcaagtgatccacccatttcagcctcccaaagtgctaggattacaggtgtgagcgcctggcattacaggcacgccccacgtgaaacagacactttaaagtggtgaacttgatgttatgtgaattttatcttaataaaattaatgctatatgcattttcatgctttaaaaattattatgcaggccgggcgtggtggctcacgcctgtaatcccagcactttgggaagccgaggcaagtggattatgcacaaggtcaggagatcgagagaccatcctggctaacacggtgcaaccccgtctctactaaaaatacaaaaaattagctgggcgtggtggcgggcacctgtagtcccagctactcgggaggctgagacaggagaatgctgtcaacccaggaggcggagcttgcagtgagccgagatcacgtcactgctctccagcctgggcgacagagtgagactctgtctcaaaaaaacaaaacaaaacaaaacaaaacaaacaaaaacaaacaagaaagaaatcatacttagagatcaaatgatattaatttatagtattccaaattaaataaattgttctcttttgaagtgatttctattttgttattttaaattcttcatcataattatttactgctgataattcatattacaatgaaaatgcatgttatttatgcatttctttttcctttcctttccttctttctattcttccttcttcctctactcctctcctcctcctcctgtgctcctcctcctctcctcctctcctccgctctttctcgtctcctcctcctctcctccttctcttctcctcctcttctccttctcctcctcctatcttcctctgcctcctctcctcctccattcctcctccttctcctctcctcctcctcctctcctcctccttttctcctcctcctctctttctccattcctcctcttcctcctctcctcctccttctctcctcctcctctcctccccatcctgtcctcctcctcccgtcctcttcctcttgtcctcctcctcccatcctctttcctcctcttcctcctcccctcctctcctcctgtcctcctccttctgtcctccccctcctgccctcttcctcctttttcttcctctttatcctcctcctcctcttcacctcctcctccttctcttcttcttcttcttcctcctcctcctcttcgtcttctcttttttgagatggggtcttgccctgtgaaccaggctggagtacagtgatgcaatcatagttcactgcagactcaacctcctgggctcaagcgatcctctcacctcagcctcccaactagctggggccacagttgtgccatcacatctgtctaatttaaaagatttttttttttttgtagagattgagtattgccatcttgtccagactggtatgtatttctttttaatctcttattttagtttgtcgatgagagtaacactgatatacaggtgtggtcacttggctctggtgggactgggaaaggaaggagacagaaaacatgcagagctggagtctggggcagacccagggacctacctgtgcctgcaggataactgaagttcaacagcccattggaaaggttcttgctcaggcctctgaggacatcctctaggccatccagcaggtgactggccacacagtgctgctgtaagcggggcagggtctccaggtccccaggggcctccagcagctcatccagcgcctgtaagatgctctggagggatgtggacacagacctagtgagccatgggccagagggcccgcatgaagactccaaccgctcagccccagggaacagatcctagagactgtctatctgggggatgaagatggcattggcggctgggcgcggtggctcacgcctctaattccagcactttgggaggccgatgagggtgggtcacaaggtcaggagatcgagaccatcctggccaacatggtgaaaccccgtctctactaaaaatacaaaaattagccgggcgtggtggcgtgtgcctgtaatcctagctactcagggggctgagggaggagaatcgcttgaacccgggaggcagagactgcagtgagctgagatcgggccactaaactctggactggcgacagagtgagactccgtctaaaaaaaaaatgacattggatgggattccctaggtgatccttgactctggttatggcccctcagaggccaacacttctgtgcaatatcaatgctgacctaaacccaaagtccagggaaagcaagaggaaagatattaagtgcacttgggtgtccattagcttccaccagccctgaaagatgctgggagtcagaccagcacccactgcattgggtcctgtcccctcccagacccaaactgccccaggcctctgtgggatgcagccaccttcctgcctcgcccccttgccctgggtcctgtccttacctggatggtgttattggccaagcctggcttgtagtctctgcccaggtcctggactttgtcgaagaatcgggaaagcgtctgcagagagaggagatgtgggggtcagagagcctggacggcgggtgggaagtttagaacaaggagacggatgcagtgctgtgtggatggagttcccgccgcctcgtccctgtgggggccactcacctggctgtggactccagggggcggggtccaggtggagaaagtcatatctgtagggaacaagacaagcggctcattaggcgggagcgtgtcagtgtgtgtgctgggggtggggagcttctagggccaggtcataccttcacagacagtgtccttttggttattcgggattccgtgtctgggcttccagcctgggcggcagcggcagctgtatgaacccacggtgttgaagcagacggtggagctgtcacactgatgctgcccggagctgcactcgtccacatctgaggacaggaagaagggggtcaggtcctgtcccagcctggagagggtcctgtctcctgtctgtgcccccagctcgttcctcccggcattagtgccccccttggagaggtggacgctgggttatggaagcgtggagaggcctgggcacagcaggtgggccccgtgcagatgagcaggttatgaatatggtgaaacgccttcctcccagtgagtcatcagctgttgcctggggtccccctgagcctcccccctcagtaccccagctccttccgcaggacccttgctcttttctcatctagcctcagaagaatgaacgcctgacacagtcgggcgcctccagcgctcattctgcttggtttgtgtgggcgccgttgaacatgtgatcagatgtttgtgggtctctgggaacgtgggatctgagctctcgaccttcacagacggtattgtttgggccattgggggaccccggaatcggttgccagcccgggcggcagcggcactgatagctgcccacgttgttgaggcagtgggtggagctgtggcatgggttttgtccggaggtgcattcattcacatctgaggacaaagccagagggtcaaaccctgtccctgaccagcctgggcctgccctccactcactgcacccactcccctatcttttcattgcctcagactgaagaccattattgcacgtgccaccacttggtgaccttcaacttcaccttcaaagcatcttatgatggtcttcctaccagatgggcacagcagggaccatggtccccagtttataggaggtgaaaccaaaagggaaactgagtcatgggagctggactttctgactaaaatctctctcctgctccctccctcactatggtggaggttccccttcttagaactggaagtgacaccttcttccactcgcacgtgacagatgaggaaggggtgaggtctgggggcccacaagggcactccaagccctgaaggccctgccgcctccctgccgtgtggcgagtccttcctgggaggtgaatccttaggcaggggcttagcaggtccttgaccttgtgggaacctgcggatcttctccctcctcctcggctgctttggaggacctgactcagctccatccccagctcccgtccagcctcacagcgtcttcctggggcctctacctgtgcagagcttcgggtcctcaggtttgagcttgaagccaggcaggcactggcacgtgtagctgccgagggtgttgacgcaggtgccgtagcttttacagagccttgggttctgctgacattcgtccacatctgcaagaggaaggagagggtgaagaatgcccgtagctgtgagcagctttcggggctgagggtccgccatgtttcctggcacggaagcatctggaaggcaccactgtctgctcccttttcttttctttctttcttttttttttttttgagacggagtcttgctctgtcacccaggctggagtgcaattgcctgatctcaactcactgcaacctccgcctcccgggttcacgccattctcctgcctcagcctcccgaatagctgggactacaggcgcccgccaccatgcccggctaattttttgtatttttagtattagacggggtttcaccgtgttagccaggatggtcttgatctcctgacctcgtgatcagcccacctcggcctcccaaagtgctgggattgcaggcatgagccaccatgcctggccatctcctcccttttctaatccacacagaggtgtcccatggtgagcatggtggcccaggccttctgttgttcagatatggctggaagcatctgagtcctccccatctcccctgcctccctgggcagctcccagctggggcagggatgtcccagcctgaggattcaggacaaaggtcagggtgggattttcttgggaccaagtgcagggggcatgctgcttgcccaggtaggacctgtcttggttcccagtggcagtcctgggccaaaggacagagccttcctgtgaattggaaaaaggcatctcctcttcaagtagtcacagtcatatttgaggaatggagagtaggcaggttttcagcttctgctcaccctcttggctgggcatccatatgcagtcagcagcctatgcaactgtacatggtggtcatgggtccttctcagtgagaaccctctggtttagtccgttttgtgttgcaagaaaagaagtttatttggctcatggttctgcaggctgtgtaagatgcatggctccagcatctgcttctggtggccttgatttccccaggacagctgctcactggctgagttatcagaatcccggtggccctagcaggatggtgctctcccatccacactagctctgagagcccagctccaggcacatggaccaagactggcccctgagccagtccccaggggagcatgagtctggtgctgcataggccagggctgcctggacagtgggtcccaggccagggtggacagtggggaccgacatacagctgggttgccccagggctgtgaaggtgcctttttttgatcctcaggaaggtgtcttggaaatggcaggatgtagtgagaatccatagctgagaaagactggccctgggtgaaggtttagtggctggagaggggcacagatgctgatgggcaaagatggaggtgtatctgtcatctcatctcttggcattccaccagggacacagacctatttctgaatggttccactcccatgggatctgggttgacctcctgggagaggatcaggcttggagcaatggccctgatgttaacctctcttgccattgggtccacactagtgcctcttccattcactcaactctccaagtatggggagtccatgtcactgtgcccaccgttagccacaacatcctccagtgcactcaggtggaccaaaactatcaggaagggtcagggcagtctcgctcagtgaaagggacagagactgagtggcagaaaaagaggtcagggctccacgaggcatcttctccaggtggggttgttggccagtggcaggttcgactggggacagtggccctgccttcaaatctccctcctccttcatttctggacagggtgcctgggtccatgatgagctgggggatcagagagagttccaggtgagcagagctgtgtggagactgtctcatcctggcagtcgctgatgatagcagagagaatggatactgcgctggaatgcaccacgcagtgagctcatcgaatatcctgagtgccagccccctttttgttttgtacaaataagataccaggtcggacatggtggctcacgcctgcaatcccagcactttgggaggctgagacgggcggatcacttgaggccaggagttcgagaccagcctggacaacatggtgagacaccccccccccatctttactaataaaacaaaacaaaacaaacaaataagatgccagatgggcagggggatgttctgagcttttggaagtgaccctctgtggagggttctgaaccttgaggtttggatagcgacaggtgaccaggtgtttgggacggccctgtgatgcctggagtaagtggggcaaggagctgagggagtggccccaggtctcctgcctatgaggcctgtgacaccaggtagacaaaaaaaacaagaatgctgaggggtgagggggatgcagacagggccccacggagcccttccctgagctgaggcttcaagaggcaggtcctgctccgaactagcaggctgttctgtgcggatggggtccatgagagccctctcccacttcattcctgctcatctgtgtctctgcctatccaccaactaagccccctctctcagtgttggcctcttttcttttctctcttctcttctctccttttcttttcttttttttggagacggagtctcgctctgtcgtccaggctggagtgcagtggtgccatctcggcttactgcaagctccgcctcccaggttcatgccattctcctgcctcagtctctgattagctgggactacaggcacccaccaccacgcccagctaatttttttgtatttgtagtagagacggggtttcaccatgttagccaggatggtctcgatctcctgaccttgtgatccgcccacctcggcctcccaaagtgctaggattacaggcatgagccactgcgcccggccagtgctggcctgtttctaacatggcaacacacctcctcaataattacaaacaccacctgtgcatgcggtgatacagtttggatatttgtcccctccaaatctcacgttgaaatgtgatccccagtgttggagatggagcctcgtgggaggtgtttgggtcctgagtgcagatccctcatgaacatctcggtgctgtccttgggtcatgagtgagttctcgccttgttagttcccatgaaaactgcttgttggaaaaagcctggtatctcctcccttctctcttgcttccttcctcttgccatgggatgccagcttcccctttcccgtctgccaagagtggaagctccctaaggccctcaccagaagcagatgctggagccatgtgtcttacatggcctgcagaaccatgagccaaatcagcttcttttctttatacatgatccagcctcatgtattcctttatagcaacacaacatagactaaaacagaggctctcactgacaaggacccatgaccaccacgtacagttgtgtaggttgctgactacatatggatgcccagccaaggcggtgagcagaggctgaaaacctctccattccccaaatggggctgtgtctacctggagaggagaggcttttctgtttctctttttctttttgtttctttcttttcttttttttttttttttttttttttttttgagacaaagtcttgctctgtcacccaggctggagtgcaatattgagatcctggctcactgcaacctctgcctctgggttcaggtgattctcctgcctcagcctcctgagtagctgggattacaggtgctcaccactatgcctggctaacttttgtattttttagtagagatggggtttcactatgtttgtcaggctggtcttgaactcctgacctcaggtgatccacccgcctcagcctcccaaagtgctgggattacaggcgtgagccactgtgcctggcccggagagtcctttttctaattcacaggaaggctctgtcctttggtcaagatatgtgcatgcaatgtagcatctgttcacaggggacccctgtgaaccagcccccctgctgggctctatgcagctgcgtgctctcagaacgtacacctctgctctgtcctcactttcctcccaccagggaggctctactgactgcagggagaacaggagggacagggctgggaacaggagcactgccacttttctctttacagcagggcaggtctgctgaacccccttaatgtcccctgggacccttggctcagcctcagcttcttcatttcctgcctttgctcaccttcccttcccactctgtgtactctgtgttaatctcccttctctgtccacctgctactggttcccatctggccttgcagatgtctgaagctccctcccgcacccaactagttcccactggaaagaaggcaaagcagagtgatgcatgggggcctggcttctcatgggctggagctgcagtgtggaataagaccatggcaagggatgaggcaggctgtgtcgaaatagatttcttctgagtgccagccaggagtgtggccccacaggagcccagcttgtctgaacaactcctaaaaggcatccattgcttatttatttatttatttatttatttatttatttattttagatggagtcttgcactgtcaccaggctggagtgcagtggcacgatctccgctcactgaaacctccgactccctggttcaagtgattctcctgcctcagcctcctgagtagctgggattacaggcacccaccactgcacccggctaattttcgtacttttagtagagacagggtttcaccatgttggccaggatagtctcgatctcctgaccccgtgatccatccgcctcggcctcccaaagtgctgggattacagtgcataataacgtttaaagaatgaagatgcctgtagcacctgctgtgtgctgggctctgttagaagcacctattctttccttggtcctcctagaaggcataggagtaggccattattatcatcctcattttatagatgggtaaaccaaggctctaagagcagtagtgatgttggtaatatcatttaggtaacaggtggcaaagccaggatttgggcccaggtagctggtcccagagttttcccttggccttcacaccacgctgcctctctgggctggcgaaacaggtacatgcacacctgtctcatctcagactccaggaactgaacctatacttgggtacctgctccctggatgctgcagaaacagctctggtgaccccaaacctcatggacagtggtgatggaggatgtggggtggttcttaccttgacacgtgttctcgctctcattcttgaatgtttttgccccagaaacaggctcatatcctgggctgcacacgcagtcgtagctcccctctgtgttccagcagtccgagaattttccgcatgacactttcgacagtgttgcacactcgttgatgtctggaacacaacaggacaggaggtcatctcccaaagatgtgagttccgtcagggcagagacccccgtcctgactccccaacatggggcctgctgcttagtatcttttggaaaggatctcaagttgcactgcacaggctatgctgcagctggagcaggccattcctgaagaccacacttgatctcagttctctggctggcatcctagatttggacacagtggacagtgctgaggtgggggatggacaggaagcgccatatccccatccccagtctttttgtagaaatttaaaccccatggcagccgggtgcagtggctcatacctgtaatcccagcactttgggaggccgaggccggcagatcacttgaggtcaggagttcgagaccagcctgccaacagggcaaaaccccatctctactaaaaatacaaaaactagccgggcatggtggtgcatgcctgtaatcccagctactcgggaggctgaggcagaagaatcgcttgaacctgggaggtggaggttgcggtgagccgagatcgcgccactgcactcctcagcctgagcgacagagtgagactccatctcaaaaaaaaaaaaaaaaaacaaaaaaaaaaagaaaaaagaaaaataagggagaaaaaaaaacctatggccagaatgtacccccttcccagtcttaacggtaaactgaggcacagactccagattcctgagcacgcagcttctctctctccaggaagccatgcctattcacttcttacttctcccccttcatattttttcctttttcctcccttccttccttccttctttcctccctccctccctccctcctttcctttttctttccctccctccctctctctctttttcttttcttctcttttctttctctccttctctctttctgtcttttttttttttttttgagatggggtcttgctcctgttgcccagacaatccctcccaaagtgctgggattacaggcatgagccaccacacctggcctctttctttgtttctttctttttcctgagacaggatctcactctgttgcccaggctagagtgcaatggtgcaatcatagctcactgcaacctcaaactcctgggctcaaacaatcctcccgcctcagtcttctgagtagctgggactccagatgtgtgccaccatgcgcggctattttgtgtattttttgtagagacagggtctcaccatgttgcccaggctggtcttgaattcctggcctcaaatgatccacccgcctctgcctcccaaagtgctgggagccaccacacctgccctctttctcttttctctggccatgatgatagtctggaaggtaaggctgtggcccctcacaacaacctctgtcccccactggcactgggctatgcctcataatcgcagatgtcccctgcgctgccctcaagcctctgtaccgtcacaagtctccatgggggtggtgatgatctcagaaaaagagctgaaccctggattgcagcgacaggcggtggcattgacacacgaggagtcctgagggcaccaccgggcacagcctgcaagagcagggagcacggtcagaaggtgaggggtaagggaatacacaaaaagggggcactgggggagatggggcagagcgctgagtttcccgtgcacgagccctctctttccctgggctgaagggggctgggcgggggtccaggaccctccccaggctctggctgtggactgtgctttctgcttcccagcagactcacccctggagtcctgggtttcagctcccggcagagtcagccagacacagaatgctgcaacagagaaaggaaagggggtcagaggggatcccagggtgggaaaggaggcgtaagggtgatgcactttgtgggaggaggatgctgacccctctcaggctcagatcctgcccatcgttcaaacagagtgagcagatgtcacgtcccactcggatgctcaaagccagagagtctgtcaccctgtcctcatgggggtgggttttgttttgttttgtttgacacagggtctctctgggtcacccaggctggggtgcagtgatgcgattatagctcactgcagcctccaattcctaggctcaagcgatccccctgcctcaccctcccgagtagctgggaccacaggtgagtaccgccatattttaaattttctttctttctttttgagacagggtcttgctctgtcgcccaggctgaagtgcaatggtgcgatctcggctaattgcaatctctacctcctgggttcaagcaattctcctgcctcaacctcccaaatagctgggactacaggcacccaccatggtgcctggctaattttttgtatttttagtgagatggggtttcaccatattggccaggctggtctcgaactcctgacctcaggtgatctgccggccttggcctcccaaagtgctaggattacaggtgtgagccacggctcccagctcaaaaattttaaaatgatttatttatttttattatttatttttttttgagatggagtctccctttgttgcccaggctggaatgcagtggtgcaatcttggctcactgcaatctccacctcctgggttcaagcggttctcctgcctcagcctcttgagtggctgggactacaggcatgacccaccatgcccagctaatttttgtatttcttaagtagagatggggtttcaccatgttggccaggctggtcttgaactcctaacctcaggtgatctgcccgccttggcctctcaaagtgctgggattacaggcatgagccatcacgcctggccaaaaaaattaaaaataatttaaaaagttattttagagacagagtcttgctctgttgcccaggctgatcttgaactcctggcctcaagcgatcctcctgcctcagcctccctagcttggcttgggggtggggtttaaggaactgaggagtaggaaagggccatgagcctggtgggggtctcagctccagctgccgctcttctgacttgggggctgtctggtgtgcctgagcatttactgccatcttcatttctttagataaaaatgaaggcatggtcaggcacggtggctcgggactgtaatcccagcactttgggaggccaaggtgggcagatcatctgaggtcgggagttcgagaccagcctgcccaatatggtgaaaccccgtctctactaaaaatacaaaacattagctgggcgtggtggcagactcctgttacccaactacttgggagattgaggcaggagaatcgcttgaacccaggaggcggaggttgcagcaagctgagatcgtgccactgcactccagcctgggcgacagagcaaggctccgcctcagaaaaaaaaaaaaaaaaatgatggcgctggatcccccaggctctaagatgccctggaaccgcatgcttcctcagggacacaggtgcacacacaccacaaccgccgccagccctggcggcccatcctgaaacccagtggtgatatttcaccccgggcgcccctcccacaggaaaacgctgtggccgcctgttggggtgcatgtggcgctgcggttcccagcactcaggaagttcccctttccaaggcatgtcctgggggaccctcctcaggtcaccaggggctttagagatggggacctagggatctccttgttgttcaccagagagagagacaaagaggcagaggtagagagaaaacggagattagggagatagagagactgaaagagagacagaaggagaaagacagagagagagagagaaagaagggagaagctgggggtaccctgcagtggagaagtcctggcctctattttccccgccccccgcccatgtctttctatgcgctatattaagagcagtggctctggggtcctagcactcactttttgcccctttccttcccccgtgcctcagtttcccctcttatggagcagatgccaaactggctccagtagaaagcttgaggatccctccgggcagggtagcaggctccgagagcaccctggagttcctgccggggtgtgggggtgcccaagcaccaccagcccctctcgccgtgtgcccgtgagtgcctgcttgaccatgtggctttctccatcgccggccccacagacaccagcggcgcctcccgtttctcagacgcatccaaggggtcccgctggagcttcctcgctaccacccccagcggggccccaaagtacttaccgagaaagacgagaaagacgcggcctcccatggttccagctgagctgccggcaggagcagcaggggaaagagtgagtgggacagggctgtcccgtctccgcaggctgggcagctgtgcgggctgtcccgaggccaggactttataaaggagggggggcggacagccgctggcccagggccctccccggaactggcggtgcagctggaagccagcaggaaagcacaataaaaacacagaaccaggggcgctgcacacacacacacacacacacacacacacacacacacacgtgtactcgctcagcaagaatgaagtgcaacctgctttaaaaatccctctgctggagtttccaccatgtggctctgaccaaccctctggcctctgtgtgttccaggctggctgctgtgcaggggaaggtgtggcagccgggcggggcggtctcgcctggggccacttggctcttccctgggcaggcacgcaggggccttgtcagaaatagctctgggctcccactttggtagggctcaccctgtgcccagagctttggcatgccagagttggcagagcctgcgtcccagctggcagtatcttcccctgctgttttccagatgaggaaactgaggccaggtacagaggctcacgcctgtgatcccagcactctgggagggcgaggcaggaggatcgcttgagctcaggagtttgagaccagcctgggcaacatggcgaagctcggtttctttctttctttttaaattaattaattaattaattaattaaattttttagactttaagttctagggtacatgtgcacaacgagcaggtttgatacataggcatacatgtgccatgttggcttgctgcacctatcaactcgtcatttacattaggtatttctcctaatgcaatccctcccccaggcccccaccccccgacaggccccagtgtgtgatgtttcccgccctgtgtccaggtgttctcattgctcagttcccacctatgagtgagaacatgtggtgtttggttttctgtttctgtgttagtttgctgagaatgatggttttcagcttcatctgtgtccctgcaaaggacatgaactcatccttttttatagctgcatagtattccctggtgtatatgtgccacactttcttaatccagtctatcattgatggacatttgggttgattccaggtctttgctattgtgaatagtaccgcaataaacatacatgtgcatatgtctttatagtagcatgatttataatcctttgggtatatacccagcaatgggatcgctgagtcaaatggtatttctagttctggatccttgagaaatcaccacactatcttccacaatggttgaactaatttacattcccaccaacagtgtaaaagcgttcctatttctccacacctgtgatcccagcactctgggaggccgaggcaggaggatcgcttgagctcaggagtttgagaccagcctgggcaacatggcaaagctctgtttcttcaaaaagaaaaaaaattacctgggcttggtggcagacgtctgtggtcccagctgctactactcaggaggctgaggcaggaagaatcacccgagctggggagtttgaggctgcggtgagctaagatggtgccactgcactccagcttgggtgatagagtgagaccctgtgtcaaaaacaaaaagaaagaaagaaaactgaggcattacagtgtccacataaaagcccagggagggagaaggggccctcttccgatgccaggcaggtgccaagaagagaagcttcaccgcacagagcagaccccccggatctttctggtctttctaagccagtttcctcctgtgggaaacttatatttcagaggcccctgggcacttcgttaatcaacagagaatcatgtgataggagggttctttcctttctggataaatcatatgattagcttgtctcttgaggtacgtaatcattttttaaaacgctatatatatttttaagagatcttactctgtcacccaggctggagtgcagggtcaccatcacagctcactgcagcctcaaacttcagggctcaagggatcctcctgcctcagcctcctgaggagctgggactacagctgtgcaccatcacgtctggctagttttctccttaagtgttttttttttttgtagagacgagatctcgctatcctgccaagaaaatgctattatttatggagcacttaatttgtaccaggtctggtcctaagtgctttttttttttaatctatattaactcatttactccttaaaacatctgcaatgatgttgtcattcccatttgacagaggaggaaactgaggcacaagtgactcacccagctgagactcagatccacaggccggcagcccagccctggagtccctgcgatgagcccaggggaaagtctccactgggcactaacatgtctttagcgcctccgtgaccctgaggcttagcaggtgtctgtatccagccagaattcaaggacttggttttgtgttcctcatatttatatttatttttaggtttccctactatctggggcaatgaggagggtttttcagtgaggatgccgaaatcaagtctccttgttacatgagtaaattcaagatgcagaagtgatgaatgctaaggaaaatatagttcagttgttcaaagggggagattgcagcgatggagaaaaaagtcactaatgactgaagtcagagaactattgtcctgggaataatcaaacatccacagtcctagaatttaccccttcctgtcccgggctcctgtgggggtggcctgggctgtgggggaggggagtgaacaccagcagaagctggaaggagagagggccagaccaggtctggagggattttgccttttttttctcagaaagccagaaactccagctagaaccccagggctcaacgtcccttctctgcagatcagacgggcaggtcagacagctggcgtctgcagaatctcagggaggtagtggcacttcctgatgccagggattgtccctacaccccttcatggtgatcatcgactcttcttaatttaattttattttactgtattttagagacagactctggtgttgcccaggttggagtacagtggcgccatctcgactcactgcaacctccgcctcccgggttcaagcgattctcctgcctcagcctccagagtagctcggactacaggtgcccaccaccacacctggctaatttttgtatttttattttattttatttatttgttcattcatttatttattttgagacagagtctcgctctgtcacccaggctggagtgtggtgatgtgatctcagctcacagcaacctctgcctcctgggttcaagagattctcctgcctcagcctcccaagtatctggaattacaggtgcaagccaccacgcctggctaatttttgtatttctagcagagatggagtttcgctatgttggtcaggctggtctcgaacttctggcctcaagtgatctgcctgccttggcatcccaaaagtgctgggattacaggcgtgaaccacaatgcccggcctgaaacattctttttaaatttttattttattattattattattatttattattacttttttctgagacgaagtcttgctctgtcacccaagccggagtgcagtggtgctatctcgtctcactgcaatctctgcctcccgggttcaagcaattctcctgcctcagcctcccgagtagctgggattataggcacctgccatcgcatctagataatttttgtatttttagtggagacagggtttcaccatgttggccaggctggtctcgaactcctgtcctcaaatgatccacgcgcctcagcctcccaaagcgttgggattacaggcgtgagtcaccattcctggcggctttcttgagtctctccaatacttctcaccatctcccttcttccctagcaaccatctgccctcgagccgcattaggctgtcagccccctgagtgacttttgtctttttctctgcagagcaccagcacagagcctgtgctgagtggggccctatatggtaaaccatgcaaattagtagtactcctgccactccactccgctgccgcccagctaaaggaagcctccttcagcctcgctgatctggtccctgccggggtgtctgcctatgtttctccgccttctctttgtccagaagtctcagtcctgctgacctattttgcagcttctggacaacctctgcaatgatggggggtgcgaacatggtcctcatttgtcaaaaggggaactggaacctgggggtttggggcccctggccccaggttgctcagctaagaagtaacccaagattacctgtaatcccagctgcttgggaggctgaagcaggagaattgcttgagcccaggagatgtaggttgcagtgagctgagatcgcgttattgcactccagcctgggcgatagagccagactccgtttcaaaaaaaaaaaaaaaaaaaaaagaagcaacccaagattatccaaccaacaataataatggtattattaattatattagtataatttattgttattattttagagacagggtctctgttgcccacgctggagcacagtggcggtggcacaattatggcttcaggcaacctgcacgtcctgggcttatgtgatcctcctgcctcagcctaccaagtagctgggactacaggcatatgttgccatgcctggctaacttttcactttttttgtgtgtgtgtgagggggacggaatcttgccctgttacccaggctagagtgcagtggcgagatctcggctcactgcaacctccgcctcccagcttcaagcaattctcctgcctcagcctccctagaagctgggattacaggcacacaccaccacgcccagctaattttttagtagagacggggtttcaccatgttggccaggctggtctcgatctcctgaccctcaagtgatccgcccacctcagcctcccaaaatgctggggttacaggtgcatgccaccatgcctagccacactccttttttaaatttaaaaactgagtgaagtcaggagaaaaaaatcttaaattgcagcatgacagattccatactagaatcttgaaaaagtctccaaagccccataggaaaaagccaccttgcaaaaaagctgagatacaaagataataaaagatttggtttcaggatacaaacatatgcaagaagactttaaaaaataatcaaggctgccgggcgcggtggctcatgcctgtaatcccagagaggccgaggtgggcagatcacctgaggtcaggagttcaagaccagcctggccaacatggtgaaaccccgtctgtactaaaagtacaaaaattagccgggtatggtggtgggtgcctgtaatcccagctacttgggaggctgaagcaagagaatcacttgaacccgggaggcagaggctgcagtgagctgagattgcgccactgcactccagcctgggagacaagagtgagactccgtctaaataaaataaaataaaataaaaatacataaatataaataaataaataaaaataaacaaggctgggccgggcgcagtggttcatgctcgtaatcccagctacttggggatgctgagacgggaggattgcttgagcccaggagttcgagaccatcctgggcaacataatgagacctccatctctacaataaaaataaaaaattcgccaggtgtggtgactcgcacctgtggtcccagctactcaggaggctgaagtgggaggatggcttgagcccaggaattcgaggtggcagtgagctgtgatcataccactgcactccagcctgggtgacagagcaagaccctgtctcaaaaataaataaaataaaaaaataagtaactgagcaaaggaataaggtgcaaagaatattcagagtggtggtaatcagcaagataaagatgggagcatgggaacaaggtcatgtctcagttcttggtgatgagggaggctcatgggtatgccttccttcccttttattttttaatttacatattttttgcaaagcaaagttctttattcccgcaaattgtgaacaatacacatagtagtttccacatatgaatgtttcctaaaatgatggctgttttgttttgttttcttgagacagagtctcttgctctgtcgcccaggcaggagtgcagtggcacaatctcggctcactgcaacctccgccccccgcgttcaagccattctcctgcctcagcctcccaagtggctgggattacaggtgcacaccaccacgccaggctaatttttttgtatttttagtagagacgggcatgagtcactgcgcccagccaaaatgatggttgtttaacgtaacgccatgtaatgcaggcatgtggtgttttgcggttatattcacatgtgattttatcagggaccaaagcaaaaacaaagagaattctgaaaagagtttgtatcaaggaagataaaatcggccaggcagagtggctcatgcctgtgatctcagcacttttggaggccgaggcgggaggatcccttgagcccaggggatcgagaccagcctgggcaacatggtaaaactccatctctaccaaaaaatgcaaaaattagccaggagtgatggcatgtgcctggaatcccagctactcacggggctgaggtgggaggatctcttgagcccaggagttcaaggttgcagtgagctctcgccactgtactccagcctgggccacagagtgagactctgtctcagaaaataagtaagtaaaataaagctgatcatggatagaccgatggtcccaagaattacattgtttcatgaattatataaacctgaggctctatacaaatatttaaaaaagaattttaaaatgtgtaaaggttttaaggagaagcgattagaggaagcaaaggagagagtagggtgggggaggggaacagctcaggggtggctgtgggggtggggaactggtggcagccaacaagaagccctgagctgggaacgctgtgtgacatttggtggcatttttatcaccttcttgcagctctcagtgtcttccccattttgcaaaatcttctgagcagggtggtgccgatgtcccgataaggatggggtcaggcttctggggggcactgtgaggatgggggtctcagaatccttcccttgactttcgatgggtggggaaggccaggggaggaagggggcttattcaggctgggtgcccacccgggtcaacccctccgcatgcctctgggcctcttctgttgtgggcttgtgggttcccgagaattagggccatggatggcactgacggtcccagccagtaccagaaagaaacgatgggaaagcattgatgagaatcaacccatccccagggctctgtccctcggatggaggtctccctttcacttctttccaggcatagaaaacagtttgcggctcctcaaaaagttacttgcagagtgaccctgtgatccagccattctgctcctgggtatacacctgagaaaactgaaggcagacactcaaacggatacttatgtttatttttaaatttaatttaatttaatttttttgagatggagtctctctctgtcacccaggctggagtgcagtggcgtgatcttggctcactgcaacctccacctcctgagttcaagctactctcctgcctcgcctcccgagtagccgagattacaggtgtgtgccaccacccctggctatttttgtgtgtgtgtgtgtgtgtatttttagtaaagacagggtttcaccatgttggtcaggctggtctcaaactcttaatctcaggtgattcccttgcctcggcatcccaaagtgctgggattacaggcgtgaagcaccgcacctggcctcatatagttactttttgtgtatggttatgacgtagggtctaagttctttcattattattattattttttgcatgtgtatatcctattcttgggaaaatttaaaggggattatttctgtttctggtaacgcgcgcgttcatcctgtgctcccctgcctgtaattctcccactagggtcagagtagggctggaaaagcgaaaaccataactagaagagacttccccaacaggatgttgcccaaccctggcagggctgacgtccagcctccagggtccttaccggcagtgcagtcacagctgtgactaaacccagccacccacagcctgacgcccccacacccttgaccttccctttagcttcgggcttgagcaggcctttgatactcaaatagagaaaggagacagcaagacccctgtgccttctcagagggggcacccccttccccgatgccttcacgggtcctgcctctccgggacccagcttccctcctggccaccccaccacctccccagccacacctcatttccacccatctagagagggtgaaacacaaacactcctggcagccctgcccgagtgtgtcctgggacatggtggggtgggggctccccgactcctgggaaggggaagtctggggtggcctgtcctcccagctcctcgccccactggttcctctccccatgagtcatgggaaaaagcaacaaaaccaaccgcagggagatataatatctcttcctgtatctgtgacagctgtcttgttggtctggccgtctgttcttcctgtgagcatctgaatccgttcagaccaagctcttcctctccttgagcaccctctatggctcccaccttacccagtaaaatccagtcttccccaaggcccacaaggcttggctgtgtgatttgccctgtcacctccagctctcttcccctcattcacttggctccagccacagcaccttcctcactattccccaaacaaatataccaggcccagtccagcctcagggcctttgcatgtgctgttttcgccacctggaatacctttccctcagaatttttttttatcttttaattattttgttttttgagacagagtcttgctctgtcacccaggctggagtgcagtgacacgatctcggttcaacctctgcccccgccccctgcctccccgttttcaagcaattctcctgcctcagccccctgagtagctgggattacaggcgcctgccaccacgcctggctaatttttgtatttttagtagagagggggtttcaccatgttggccaggctggtcccgaactgctgatctcaggtgatccacccgcctcggcctcccaaagtgctggaattacaggcgtgaccactgtgcctggccgagacactgcacctggcctcttcttacttttagagacagggtcttgctctgttgcccaggctggagtgtggtgttgccttcatggctcactgcagcctccacctcctgggctcaagtgatcctcctgcctcagcctcctgagtggctggggttacaggcccgagccaggcctgttctgtttcttctctgtactcgaaacctacagcaatgctctaggtttgctcaatacacacagtagctgctcaataaatgtgcataaataatacatgaacgatgagttctagctgggaaatgacaactgggaaaagtgggatgtggaggataatttaagagatgagagctgtttccgaaactcctggggggcctgaggcgcccggatcggggagaaacgggggcgaccatccacttccccggcagtcgcacgcacctccccttggcggcccacagatggcgctggctccacgcgctgcagcggcgggaagccggaggtgggaaaacccaagctttagccccctcccctgtctggctgctggggtcagttcctggcccggattaggatgccaagcccgggcaccctgcttggggtcccacctcctggtagacgggctttttggtcaaatgaggggaatctgagaagagtgggggtggtccactctgtggtcctccctctgtccacgcatgctctgatttccccattcctaaaactagttcagcagctccatgcctgggggaggggtgaacgcacttaaccatgttcgtgttctgccttaactttatataggttagagctgggcgcagcgcttggtgtcagtgggtcctgggtgcacatttgtggaacagtgaatgggtgaatccctgttttacagatggggaaactgaggctcaggaaggcgatgcggctcacccaggttcatagagccagaaaatggcaaggctgggatcggagacaccaggcctgcgtgagtccagagtcagctcgttttttttttttgattgtttgtttgcttggtttttttttttttttttttttttgagacagggtctctgtcacccaagctggagtgcagtggcaggatcttggctcactgcaacttccgcctcctgggttcaagcgatctcctgcctcagactcctgagtagcggggattgcaagcgcgtgccaccatgcccagctaattttttgcatttttggtagagacagggttttaccatgttggccaggctggtctcgaactcctgacctcaagtgatctgcctgcctcggcctctcatagtgctgttgcccaacctcaaaaaacgaaaacgggaagtttttgtcaacaggagcgtgggaaccggaaatccttgcttccgataccggaagtcagagaccacacatttgcagggagcgaaattgaggtcccagtgcgggggcctgcagaaatccaggaataggactcagggatctagggctgggatgttggtggttctgagcgcccaggaaataggagttctatgagagtaagtatgagaaattggaagaatgcagagcttggaaaggaattggagggagtcagagaatgagggagactactgtgagctgggagggaccagccagagtggcgccagtgtcccgtggttcaggagttttgataagagaatgcaataaactagaattgcactagagttaaaaaaaattaattatagtttatttttttgagacagagtctctctctgtcgccaggctgaagtgcagtggcaggatcttggctcactgcaacctcggcctcccaggttcaagcgactctcctgcctcagcctcctgagtagctgggcctacaggcgcgtgccaccatgcacagctaatttttgtatttttagtagagacggggtttcaccatgtttgccaggatggtctggatctcttgatctcgtgatccgcctgccttgacctcccaaagtgttgggattacaggtgtgagccactgcgcctggcccaattatagttattttaaattccctattagtttatttctaagtctggtttctgctgatttctctgtggtttgtgttttcttgcttttgcttgtgcttcataatgtttttcgagacggagtctcactctgtgcccaggctggagtgcagtggtgtgatcttggctcattgcaacctccacttcctgggttcaagcaattttcctgcctcagccttccaagtagctgcgactacaggtgcacatcatcacgccgtctaattttttggatttttagtagagacagggtttcgccatgttggccaggctggtcttgaactcctgacaggtgatctgcctgcctcggcctcccaaagtgctgggattacaggtgtaaaccaccgtggctggcccgtgtttcataatttttgattgaatgctggacaatttgtgtagggcagctgacaatgaggtattatttatgactggaaatgagcacatctttatattatttctcctaagctatttttgtgggaggttaagtctgtctggaatcaggttaagtctgtctgtaatcagtgaaccccaggcttcagtttatttgagtgttactttggtgtcttgtgttggggtgagggctctctttgcaagagggtttgtttgtctcatagttgttctaccttcagctgtggctcttccctatgtagctgcatttcagagagagtctctccacattctttgcactcctgcagagttctaatactttcatcagtgaccactcttggggctattaaattcattaaaaatttagatgaattcttcttagtcacttgtattgacacccagataacttccttttgtgctctgccttaggttcgccactactccttatggtctctctttagacactcctgtctttcctttggtttcaggctactttcttgtcccattacctctgttctctaatgggttcaagaaaattaatggttttgtagtttatttggattttcttattcttgggtttggagccatactcattttcattttctattttctaggcagaagtagagatcccctccattttttcctaacgttttaataattttatttttaatttttagattttaaatccatcaccttatagccatacatattcacagttttataaaacatctattgacaaaattaactttgtgcagagaaaaaagcatttgatctggatgtctaggaattcatgagagtatacccttaatgaattaagaactaattaatgcatttgctttcctgacacttttatttataattttaaaacatagaaaaaattcagaagattgatacaataaacactcatatatcatccatagagatggaacaatattattatagtggcaccctagaaaacatctctctctatatacacagatttacacatacaaaacattggtagtcagtggcagatatcatggcacttccatcttttttttttttttgcagcagagtttcgctcttgttgcccaggctggagtgcaatggcccgatctcagctcactgcaacctccgcctcccgggttcaagcgattctcctgcctcagcctcctgagtagctgggattacaggcgtgtgccaccacacctggctaattttgtatttttagtagagacagggtttctccatgttcgtcaggctggtgtcaaactcctgacctcaggtgatccacccacctcggcctccccaagtgctgggattacaggtgtgagccaccgtgcccggccagcacttctgtcttaaataattcttcaacaaattctaagaataagaatgttctttatataaccatgatactattattacacccaaaggaataaataatttcacaataacttttaatatgtaatgcatagtcaaattatcccgcttgactccaaaatatcttttatactatatatttgaactagagtttccaccaaaactgatattgaatttgattgtttttctggttttgtgtcttaatctagagtagctactggccacttttttcatgataatgactttagaagagtctaggtcaattttcttgttgaatgtctcatgttctggatttgccagtttgtttcctcatcatgtcacttaacttcttctgtccctcatatttcatgtagattgaaggttagatctagaagaacggggccaccaaactttttctataaagagtcagatagtaattttttttttttttttggttttgtggccttatagtctctgttacaacaactcaactctgacattgtaggttgaaagcagctgtcaataatacatcagtgaataagtgtagccatgttccaataaaaccatatttgtaaaaacaagcagcagggtgaatttggtctgcatgttgtagtttgccaaccttcagtctaaagactagattagattaagattaggctgatttgtcaataattctttatttgccacaaacatgattttgtaacttcatgtcttatcaggagatatataatgtcaggttgcccctgtattgataatgttaagcctgagactgagttcagatagtgactatcagatctccacattgtaaatgtacactttggcacttgtaattaatcagtaatttgtgagatgattctttggcactgtagggataccctgttctccaatatgcaacatttttagtggtcatttactggatattgaaaaatcatgattttctaattctatcatatcttctacatttattggctggtattttatgtatcactatgaactcatggatattttttatttaataggttataataatttaaagtcattttccttgatgttccaatcggtatgaatttggtcagtgggagcccagagggaatattattttaggtggaactgctctggatttaggtatcatgccgaggatgaaataacgttatctataaatacattttacaaaatgtgcagtagaaatatatgcctacttccatagctcagtttataaaatggaagagtgaagagattctatttacaaagttctgattttactctagccaggaaacattaaaaaattatctgtaagctctgtaaaggcaggaattgaatctttattgatctgtgtgctgcacttggtgagtaataaaaatatatttgttgaatgaattaaattagtgactctttagaaaaggagagtgaagaacatggggcatgcaggtagggagctcaggtgacctggttttcctgtaactgagatgtttttctgggattggggctttttgtactaaaccaggaaagtgctgggcaattgagatcagttgtttgctttacatgaaggtcctggactgaacaataatttcctctcttatgctattttaagaaagtctgttaaggctggttttcctggttatatattttcaacttgaggaagatctttttagaaaaggaggttgaagcagaggacttaatccaaagtatgtgtgaaattgggccatagcaccttacctgcaatgggagttagctgagcatgctctacggatcagaacacctaaattctacagcaaatgagtgtcaaacatttcctggaaattttcttttataatggtgccatgaaaagttatttgtaacaaacatgaaaaagcatttttaagatactcctggctcagtgaatgacagttcaatattgtcctcattttccaggagacaggatcatctggtttagctgctcattataattatcctgtgaaagaagatgtacaaatactactgtataaagaagtacaaggcttgtacattgaaaattatgaaacattgttggaagaagttaaagatctaaagaaatggaaagacatcccatgttcatgaattgggaggcttagtattcataagatagaagtactccccaacatgatgaatttaacatagtccctaccacaagcccagttaacttttttgcgtaaattgacaggatgaccctaaaatttatgtggaatggtagaggattcacaatagtcaaagaatcttggaaaagaagaaccaacttgaagactcacatttcctgattttaaaacttactacaaagctacagtaatcaagacagtgtggtatgggcataaggattagacatatagcccgatgaaatagaatcaagagtacagaaataaactcttacatttatggtctatagattttcaacaaggatgtgaagacaattcactggggagaaagaatggtctatttaagaaatgtttctgggacaactgtatttcagcatgcaaaagaatgaagttaagcttctgcttggggcctggaagggtgatgtggctgtggcatcgccggcctcgctatgtctgccattttcaatattcagagtctattgactgtaatcttgctgcttatatgtacctgtgcttatattcgatccttggcacccagcctcctggacagaaataaaactggattgttgggtatattttggaagtgtgccagaattggtgaacggaagagtccttatgttgaagtatgctgtatagtaatggccttcagcatcctcttcatacagtagctggggaaaatgccagaatttaattgccatcagatttcattgtgaacaaggacttactgcagaaaataatggaaaggatgtttaactcttttatctccgaacattgaatgagataaatttccagatgctgttctctattttaatgttattggaccaatattctgtataaataattaagatgtaaccatttaatagtctgtaacaatgaacctcagtactgtcactacaatattacattctgcaaatgttattctgttgtatcagatacgaaattttagtgaggtatctctaaggcatatagtagaaaacaaaattggttaattaagttcgtttcactgtgatttggaaatgatttaatctttatagaatgagacccttttttggactagctttttttattaaaatggctcaatatgtgtaaaaaaaaaaaaaaaagaatgaagttaagcccctacctcacactgcattaaataaccaactccacatggatcataggcctaaaagtaagagctaaaactgtaaaacttgtagaaaaaaaaccagaagtaaatctttttgaccttggtttaggcagtggatttttagatatggtatccaaagcacaaatgacaaaatacaaaattagataaataggactgcatcaaaattaaaaatgtttatgcatcaaaatcatctggcaagagacttatatccagaacatacatagaacttttacaacttaacaataaaattcaaataacccaattaaaaatgggcaaataatttgaatagatatttccccaaagaagatatgcaaatggtcaatatacatttgtaaagagtcttatcataagtcattagggaatgcaaattaaaaccacaccgagttaccactccacatctgttggaatggctaaaataaaacaaaagacaagcaattaacaagttttgatgagaatatggggaaattggaacactcctacattgttggtggagatgaaaatggtgcagtcactaagaaaaatattttggcagttcctcaatatgttaaacatagcattaccatacaacccagtaattctactccgaggcatatattcaagagaaatggaaacatatgtctacacaaaaatttgtacacaaggctgggcatggtggctcacgcctgtaatcccagcactttgggaggctgaggcgggcctaccacctgaggccaggagttcgagaccaacctggccaacatagtgaaacccgtcttactaaaaatacaaaaaaattagccaggtgtggtggtgggtgcctgtaatcccagctactagggaggctgagtcaggagaattgcttgaacctgagaggtggaggttgcagtgagccaagaaggcgccattgcactccagcctgggcaacgagtgaaactctgtctcaaaaaaaaaaaaaaattgtacacaagcgtttataagaatattcataatagtccaaaagtggaaaaactgaagtgtctctcatattgatgagtggatatcaaaatatagtctatctatacaatggagtactatttggcaaaatagataatgaaataccaatacatgctacaacatggatgaaccttgaaagcattaagctaagtgaaagaagccactcacaaagtcaaaatagtgtatgattccatttatatacaatcgagagagagagagagacagagagagagagaaagaagttaagtacaactcaagggattctgacttgagatgctggaataatggagttttgccatgtacatagatgggaagattgtgagtggagaaggctgggagtaattaggattaagattttgggcatgtcaggtttgaaatgtgtgttaagcttccaagtggagttgtctaagaggcagttgggtctatgaatctggagtcatcttgtctgaagatacgcattttggattctttagcctccatatatgatcttaagtctatgagacagcatgacattaactagagagacacatggtgagagacagatagggaaaagtgaggacaggtagggaaaagaagaggctagaagacgaaatcatggaatgttgcagcactgagaacttgagaagatgaggaggagccaatctgggtttcagctttaacaccaaccaactggtacctgtttatatccctggtgatctactagtagccacatctgatggtcactcatttaattatcctgacatttcacttcccaacatttcttccatgaaactcttctactcttttgacaattctcccactctctcagccccgcccaccccctaacgctgaccttttctatttatccaactttactaattaatgtttaatatgtgtcttgtggcttacaacacagacacatgcacattggcctggggctgcagattattcaaggaagcatgctcagtgctcatcagtaaatgcctggagtgttgggtgcattcttgtgtctcacaatttagaagcagcagtgatagaactgagtgaatatagaatgtcagtggaagaggagttgttgacaaaggaactcattccaccttctaaggagtatagaaaactcgtaagggtgaagacaggaataaaccttttgtctaagaaatgactagtggtttcatggaagagtgttgaaaattgatcgattccttcaaaataactaatcatagacgttatagggaaggcaattttgactcagatttttcaatctctaatgctgggagctgtccaacaatagagttgattgcaccattgtaactgcccaatgggttcaccttgcctgctgcctagacagagctgctttatcaagacaggagaattgcaatagagtttaaattcatgtagagccagctgtacaggagaccgcagttttattattactcaaattagtctccctgaaaatctggggattggggttttaaagaataatttggtgggtaggagttgggaagtggggagtgctgattgattgggttagagatgaaatcataggaagtcaaagctgtccttttgtgctgagtcagttcctgggaggggccacaagaccagatgagttaatcagtctgggtggtgccagctgagcaatggagtacagggtctgcaaagtagctcaagcaccaatcttaggttttacaatagtgatgttgtccccagaagcaatttggggaggttcagaatcttgcagtctccagctgcgtgactttcttttttcttttctttttttttttttttttttttgagacagagtctcgctctgtcgcccaggctggaatgtagtggcacaatctcggctcactgcaagctctgcctccctggttcacgccattctcctgcctcggcctccagagtagctgggacaacaggtgcccaccaccacgcccgtctaatttttttgtatttttagtagagacggggtttcaccatgtcagccaggatggtctcgatctcctcaccttgtgatccacccgcctcggcctcccaaagtgctcaggttacaggcgtgagccaccgcgcccggccaactgcgtgacttttaaaccatagtttctgatcttgtggctaatatgttagtcctacgaaggcagtctagtctcccagcaggaagggaattggttttgggaaagggctgttaccgtctttgtttcaaagttaaactataaactaagtttctcccaaagttagagcccaggaatgagcaaggacagcttggaggttagaggcaagatggagttagttaggtcagaccactttcaccgtcataatgttctcagcgatgattttttgcaaaggcagtttcagcatcactctcctcaattagaaatggaaggaccaggccggttgcagtggctcacgcctgtaatcctagcactttgggaggctgaggcaggcagatcacaaggtcaagtgatcaagaccatcctggccaacatggtgaaactctgtctctactaaaaatacaaaaatcagctgggcgtggtggcacgtgcgtatagtcccagctactcaggaggttgaggcaggagaatcacttgaatccgggaggtggaggttgcggtgagctgagatcgtgccactgcactccccactccagcttggcaacagagtgagactccatctcaaaaaaaaaaaaaaaaaaaaagacaaagaaatggaaggaccgtttccactaattgagtgagttacatgaaaagttgaccattcattcagtctttcctgttctacatcactcccctggaagacgacggcactgaattagctttaacatgtgcgtgatggtgaataatgacataatcttacaatggcgacttcacataagggtgttactcaaaatctctgtgagacttaactacagagtagctgaaagtttttctagcttcacagctttgttaattctacttattttttcaagatttgcatatactagtttaggtttacctattcaacaagaatttaccacactttccttctatgtcagagattttgctacacagagggggtatgaaggtcccacccatcatgagaattaatatttagattactaggaaaggatcacttattgtttgagttagcattctatgtatagaacaaaacccttctaattacacagtaataagaatgcagttttgcaaagaatttcatgtacattagaaaattttaatggtatgctgagatgcttaaaaaaaatctaacttaggctgggtgctgtggctcatgcttgtaatcccagaacttggggaggctgaagcaggcggatcacgaggtcaggagattgagaccatcatggctaacacagtgaaaccccgtctctactaaaaatacaaaaacaaaatcagctgggtgtggtggcatgtgcctgtggtcccagctattcgggaggttgaggtgggagaatggcatgaactcgggaggcggagcttgcagggagccgagattgcgccactgcactctagcctgggtgagaaagcaagactccatctcaaaaaaaaaaaaaaaaaaaaaaatctaacttagacgagatgaagtgagagcaatgttttaattcaggggtcagcaaaccttcacagtgaaaaaggccagagagtaaatattttaggtaggttttccaggtcagatgatttctgtggcagttactcatatctgctcttgtaacatgaaagcagccacagataatatgtacacaagtgggtgtggctatatgccaataaaattttatttgcaaaaaaacaaaaaaaaacagaaatgggcaatttgggatgctggtcattctttgcatttaaagctagtcttgatgaaactgtcttttatgggttgaattttcattctctacaaattcatatgttgaagtccttaccgccaaaacttcagaatgtggtctcagctattctgacctttgtgaagccaatgtttagttttttcattgcaaatatctgagatgttcacaatagtttgcattgcttatgtgatcatatgttacattaaagccctcagttagaaatagggctgcggtgaatgtaattagttaagctaagatgaggtccatagtggagtagagttggcctctaatctgaatgttgtccatataagaaggggaaatttggacacagacacacctagagggagaacatcacctgaagatgaaagcagagattggggtgatgcttctatattgtcaaggaaagccaaagactgccagcaaccggcagaagctaggggtaaggcatggaacagaatctttctcacagccttcaagtggaaccagccctgccaacaacttgatttcaggcgtcatagtctacagaaatgtgagacaatcaattgctattgtttaactcacccaatttgtggcacattgttacagatgccctagaaagttaatacaccgtcttcaaaaattgtcaaaatcaagatgaagcagcatagttgtctggggtaacacctgaggtttgttgtcccacagccatggaagaagactgggatgcggacacaccagagtgaggttaagagcagaagtttaataggtgagagaaagagaagagctctatgtgcagagaggggtcccagagaaaatgggttgccagttccatggtgaaatgcacagggttttataaactagcttgaggaggtgttgtctgatttacataggccataaaagattggttggatcaggtgtgccatttgcatagcatgtggagaagctggctgccccaccctaatcttttattatacagatgggttctttacctgggcagccccatgttgcctgttcctttgctgtacacatggttgacaaagaaaaggaagagggagcctccatgttgaacatgactggtccccagctagcccttttctattggcgcagcagccggcattcactcatgcaagcttccagcttgcttatctatgtctgcagctcgatttttcaggctgttctttgttagaaaagaaatgattttgagggctgctttttgttaacggggaaaccttgccaaggactctgtggccctccctatctacctaaataatttctttctagctcctgtatcaaagacacgataagatatggtaattccagaactaaaagagaatacattgatgtttggatacattcaagaaccaccaaaagtgcctcccaatggtccaagccttgctacttatgaaagtcctgcagtgatgtcaccattaaaaaatgttgccctactgaggagtctccccagggccctcttcatgtccgtgttcctcaggctgtagatgaaggggttcagcatgggggtgaccatggtgtacatcactgaggccaccagacttgtcctagaagatggtgtggctgcagaactgagatagaccccaaagcccgtgccatagaacaaggtgaccactgagaggtgggaaccacaggtggaaaacgctttgtgctttctcccagctgaggaaatcctcagtatagagaaaacaattttatagtaagagaaaaatattccagtgaaggaaatcacacccaggacgccagttgcaaagtatatcaccacgttattaatgaaggtgtcagaacaggcgagcttcaggacttcaagtagatcacaaaaaaagtgtggaatttccatttcggtgcagaaggacagcctcaaaacagtcaaggtctcgagcagggaacccatgacactgatgcaccaggaccccagaaccagcagtccacagagctgggggttcatgatgaccgtatagtgcagggggtgacagacggccacgaagcggtcataggccatcacggtcaagagtaaattgtccaggcatccaaatgaagtgaaaaaaaaaatctgactgagacagcctgcatatgttatgaatttgttctgtgtcagtatattcagtaacatctttgggacagtcgtggaggtaaaacagaggtcagcaaaagacaggttggagaggaagaagtacatgggggtgtggaggtgggagtctgagcatatggccaggatgatgagcaggttcccggtgaaagtgactaggtacatggagaggaacagcccaaagagaatgaactgaatctctgacgttgctgaaaatcccaggaggagaaattcttgggcatgtgtttgatttcctgtttccatggggataaaataactgccacaagagagaaaaaagcaacagtcaattatcaacacactggcaacatggaaatttggttacatttaattttaagtgaaggaatcaattaacaaaagattgcctttttcttgctgtctttttctggggcatctgaaattcttccatccttttctttgctaccatcgggatctggaaatgtagtgttagttccataatacttgtaccctctatagcctggcttctcaaagtgttgtccatgaaccaacaagatcaacaagagtttctttaaatgcagaatccctggtcagacctacggattcagaatctacattttaacaatatcaccaagggtttcacatgcatattagtgatataggagttaagaaaaaatcacttacgcagatagtaaggttatgggagtcctcagtgaggcttttctttttaatgaaaagcagccccaaatcattttctaacaaagagcatcctgtaaaggcgagctgcagacacaaacaagctgggagcttgcacgggtgaatgccggcaggaactaaggactagaagttttcaagatggtggctccatcttcccttctctttgtcagccacgagcagacaagatggcgcagatcaactggaaagtccaattgcaaagtaagattagggtggggccaccagccttccctgagcactatgaaaatgtcatacctgatggaaccaatctgtgagcctgatgtaaatcagacactgcctcctcaaaggggactattaaactctgcgcattcaccaccagcctgtcctttcctctcggagacccttttctctatggagagaggtgtttctctttttcttctcttctccctattaaacctccgcctctgaactcctcgtgtgtgtccgtgttctaaattttcctagtgcatgccaatgaaccccagggtatatactccagacaatgtagcagcttcattaatatttgagtagcaatggtcttggacacttacagcttctagttctcagctcttctcacctttgttctcctccatgtcttccctcattcctcattacctaatatgcatgcaaaacaggagctcaataactatgctttttccccctgctatctgcatggagttgatacttttcacacattgttctcagctattccaacctttgtttataaagccaatgtttcattttttcagtgcaaacatctgacatgtttacaataatttgcattgtttatgtgatcatatgttacattattttacatgttcgttttgtgagtttctgttctgtcactggaaagccagtcagacattatgctttaaaaaaatattttggtaaaatatggttaaaaaattttataggtactgcgtattaaattaatgcgattttaggatatattttgaattttaggtagagaactccaaagtaccaatacttcacagaaacatagataataccgtggcagctgtcataatcaacttgatcagtgtattagtccattctcacgctgctgtaaagaactacccgagactgggtaatttatgaagaaagtggtttagttgattcacagttctgtatgacttgggaggcctcaggaaacttacaattatggtggaaggggaagaggaagcaagcatcctttttcacatggcagcagagagagagagagcgcgcgctaaggcggtagcaccatacttttaaacaaccagatttcatgagaatcccatcacaagacagcactaggggaatggtgctaaaccattagaaactgcccctgtgatccaatcacctcccaccaggcccctccctcaaccttggggattataattcgagatgagatttgggtggggacacagagccaaaccatatcagtcaggaatctggaaaacagtcaaaggtttagagcaacaaagtgaatccttaattttttaaaaaaggtgactgaaaccaggttggacagctttgtggcaatttatcattttcccaccatctttcttggctcagtggcattgctgaatatgacaaccccacagtcccaccagttcctggtgctgaagatagcggaaatgtatggcaatgttctgttttaatatgtccaatgggccgggcgtggtggctcacgcctgtaatcccagcactttgggagactgaggcgggtggatcacctgaggtcaggagttcgagaccagcctgggcgacatggtgaaaccccgtctctactaataacacaaaaatgagctgggcgtggtggcacacgcctgtaatcccagctacttgggaggctgaggcaggagaatcgcttgaacctgggaggcggaggttgcagtgagccgagattgtaccactgcactccagcctgggtgacaagagtgaaactctgtctccaaataataattaaagaaagataataattccaatggactgctgaaggaataacacaaggagcttacctttacctaccttgaaacctctctcaaaggagattgttgaaaacatttaaagacaaatgaactatccacaagtgtctggggaaaagcatatgagtagtggtaaatgatggacacgctgacatgtcttggaagaaaggctgtggagtgagatatttgggacatatgactttgaaaatttctcacgtattcctgggaatgtagaggtgaagctctgtcgttgtctggggtaaatacccaaggttcctcatctcacgccaaggaaattgagtacgcagacacccaaaaagtgggtttagaagcagaggtttaataggcaaaagaaagagaaaggagaacgtgcctgagtgggacttcctgctggcagcaaagtacactggattttatagactggcttgaggaggcagtgtttgatttaaatagggcccaaagattggttggggccaggcgtcgtggctcacgcctgtaatctcagcactttgggaggctgaggcaggtggatcacctgaggtcaggagttcaagaccagcctggccaacatggtgaaaccccgtctctactaaaaatacaaaaattagctgggtgtggtggtgcgcatctgtaatcccagctacttgggagcctgaggcacaagagtcacttgaaactgggagatggaggttgcagtgagccgagatcacaccactgcactccagcctgggtgatagagggagactatgtctccaaaaaaaaaaaaaaaaaaagaaaagattggttggaccaggtgtgacgtttacatagtccggaggaagctggctgctccatcctaatcttctattatgcagatggggtctttgcgggtcgctgccatgttgtcttctccttactgtacacgtggtttgcaaggaaaagggaagatggagtcaccatgttgaacatgcctggctcccagacagccttttcctatttgtcacagctgccagcattcacccgtgcagggttccagcttgattatctatatctgcagcttgattttacaggctgctttttgttagaaaagaaattatttgggggctgctttttattaaaagggaaaccttaccaaggacttccttaccctccctatctacctaaataataataataataataattttttttttttgagacggagtgtcgctgtgtcgcccaggctggagtgcagtggcgcgatctcggctcacttcaacctctgcctcctgggttcaagtgattctcctgcctcagcctcctgagtagctgggactacaggcgcgtgccacaaagcccagctaattttttgtatttttagtagagacggggtttcaccgtgttagccatgatggtcttgatctcctgatctcgtgatccacctgcctcggcctccgaaagtgctgggattacaggcgtgaaccaccgtgcctggcctaaatatttctttttaactcctatatcagaaagattcctgggaatgtaggatacataggtgtcctacccaggattgcatgctaagtaaacatctagaaggccctgacctctcacctgtagctgatattcaagctctgtgcaagtaggaagttaaggcaaaggctggagttgaaaaatgctcagctgagtggtaaaggcctgtctgaaagcacatacagagccaaactgcaaaggttgggagattttggttttgggctccactgtttaaggaaatctcttatcaaatcactctctggccattaagctaacagcctagagacttcagcaaccacacactggacaaatatgcaatctttataaaattagaagactcattaggcaagtaaacaactgcaaattacaaaaagcagcaaccataaaccccaaggaggagagaaaatttgatttccagagtcgccacactataatattcaaaatatttagttgtaatgaaatattatgagacatgcaatgaaacaagaaagtatagcaaaggaaagaataattaattagtagaacctgaccccaaggaagcctttactgaggctcaatgcctgggcttcttcgtttacatgcaatctcatttacatgaaatagccacaatacataaacgagtcgcaggataacgagtcgcagggactggggagcgggggtaggggatgaggataaagtgctactgtaatgtgtaagtggttttatttaggagtaatggaaatgttttgaaactagatagagatggtggttgcgcaaaacacagaatgtagtgaatggcactcaattgcttgctttcaagtaactggttaatttatgttatattaatttcatctcaataatttttttttgagacaaggtcttgttttgttgcccaggctggagtgcagtggtgcaatcatgactcactgtagccttgacctcctgggctcaagcaatcctcacatgtcagcctccaaagtagctgagactacaagaatgcaccgtcacacccagaagctagtggatctagatagataggaagtttgattgcctattgaattcctattaaattcctctgctatgtatatggcctcaatgtttgaattcacaagcacgggggttagaaggaacatttcttgttcagctttgatcactacgctgcagaatgcccaaagaaggtccccagtctgtactcctcctgcctgcaaaaaaaaatctgagagttcttggggctagagcttcctcacactcaaggggaatgagatgcacattgattcaaggctcattgagaccctggtgccttctgtaatctaggaccatccctggagcatcttcatgtctcccatgatggtccactgaggcaggacccaagaaacaggaaaataattttttttttttttttttttttttttttagacagaatctcactctgtcacccaggctggagtgcagtggtatgatcacagctcactgcaacctccgcctactgggttcaagtgattctcctgcctcagcctcctgagtagctgggataaaaggcatgtgccaccacagccggccttgttttgtatttttagtagagacagagttttgccatgtgcccaggctggtctcgaactcctgacctcaagcgatccacttttctcggcctcccaaagtgctgggattataggcgtgagccaccatgcccggcctgggaaattatttctgtgtgacaaaaaataatctgaatgaccagcttcattgggttttctttttctaccttccacatgtgaccatccattagggatctagtaataacatttttaagtcacaaactttgagagggaccagctatttttattatcccatttatataagactgctatctaaaaattacaacagttctgggacatatactgatatgagtcaatccaaaaatgtaatttggacatcaaagtaagaccagatggtgacttgttaattggagacaccaaattaatgttaataatacagaaaattgtcctctaactatgatggtattatacaataagtctgtactatttagagtctaaatgttcttgtcactcaatgagatgtgctttaactcaagacaaggtttactgctatttttttcagggctcctgaatacctgggcaatacctagtgtccttggctcccctctactgctgtgtggctgttactgtgtgtgaggtctttagcctacattaaggaacatttcaagaatctaaaaatgtgtttttggattccttcaagggaattggctggaaacattgctccttccatcacacaatgtgactgctttaagagaaacagtcattaatgtattttatgccttcatgtcaggaatggccatgttgctaagttttattttaagttccaggatacatgtacaggacatgcagatttgttacacaggtaaatgtgtgccatggtggtttgctgcacctgtcaacccatcacctaggtattcagccctgcatgcattagctatttatcctgatgcgctccctctgccaactcccactgacaggcgtcagtatgtgttgttcccctccctgtgtccatgcattctcattgttcagatcccacttatgagtgagaacatgaggtgtttggttttccattcctgtgttagtttgctgaggatgatggcttccagcttcatccatgtccctgcaaaggacatggtcttgtccctttttatggctgcgtagtattctgtggtgtatatgcacaaaattttgtttatccagtctatcatcgatgggcatttgggttgattccatgtctttgatattgtgaatagtgctgcaataaacatatgtgtggatgtatatttataataggatgaattatattcctttaggtatatacccagtaatgggattgctgggccaaatggtatttctggttctagatccttgaggaattgccacattgtcttccacaatggttgaactaatataggttaccaccaacagtgtaaaaacattcctatttctccacagtcttgccagcatctgttatttcttaactttttaataattgccattctgactggcatgagatggtatctcattgtggttttgatttgcatttctctaatgatcagtgatgttgagctttttttcatgtttgttggccgcataaatgtctccttttgagaagtgtctgttcatgtagggatggccatgcttctattaagcacttttttgttttaatgttatggatcctgctaatcttgtaattgatcattgtgccagagattgcctacccaatatatccattctttttttgttattaatagaactcaattatatttggaagtggtcatgtgtccagctaagatactatattttccactctctattgcaaaatcatggagagttgaagcataggaatttatttgatgggaatcctggaatcctctttagaatccttcccctctgttcatctctttcttgcctgggatttgcacatgacactggaattcccttagctgatatatcttggaaaacaacacattaaagatggggcagcagagagatagagtaaacccttgtgcctcaggttagcacagagtgatcatggtgacccattcttttagggaggagacacattaactcctgattgaattaaaacagtggtggatcacgaggtcaggagactgagaccatcctggctaacacggtgaaaccctgtctctactaaaaatacaaaaattcagctgggcatagtggtgggtgcctgtagtcccagctactcaggaggctgaggaaggagaatggcgtgaacccaggaggcggagcttgcagtgagccgagattgtgccactgcactccagcctgggtgatagagcgagactcagtctcaaaaaaaaaaacaaacaaacagtctttagaagcagtcaacaaacatgaaaaattgctcaaaaatttctctacatcctcaccaacatatttttttatttctttaataataaaccattctgactggtgtaatcatcagataaatgcaaattaaaaccacgatgagataccatcttacaccagtcagaatggttattttaaagaaataaaaaaaaaaaaaacaacaacagatgttggtgaggatgcagagaaaagggactgcttatgtgctgttggtgggaacgcaaattaattcagtctctatggaaaacagtatggagatttcccaaagaactaaaagtaggactaccattcaatccagcaatcccactagtgggtatataccccaaagaaaagaaatcattacacaaaagacacctgaactaatacgtttatcacagcactattcacaatagccaagtcatagaatcaacttaagtgtccaccaatgtatgattggataaataaaatgtggtatatatacagccaacggaatactactcagccataaaaagaatgaattcatgtcttgtgcagcaacatggatggaactggaggccattatcctaagtaaaataacttggaaacagaaaatcaaataccatatgttttcacttataagcagaagccaaacaatgtataccatgggcatagataatggaataatagtaggcattggagactccaaaaagtgggagggtgggagggatgaggtttgagaaattacctattgggtacaatgtacactatttgagtgatggttacactaatagtccagacttcaccactatgcaatgtatctatgtaacacaaacgtacttgcattcattacatctgtaaaataaaagtttttccatttatgtagacacatttcaacctaacagcacagaatgctttgtcctcgttagaactcatagagtcatatcggggcccaatttgggctactatgtaacatttggtgaaatatattttgattacttctgtaattatgcacctcgttgtatgcccccctttttttacttctgttacaatatttcctttgtcatatacatttaagatatttttctttgttttgcatattgagtaggtttcttgaaattcttttggaacatgttatgtaaatgaacaaataaatcaatggtgtgtttcgagtgacactcagccctgaatttgacccattgtatctctactttcaaaagcattctctgagatctccttaaactcactgttgtgctgatgagggattgatccacagaatgtaagaaacatctctggggtcaggttctagagggaaaacgctgaagtaaaactcacacctgcccaactccaagtcagggcctttctcactcacaatgcttcataaatacgaggagatggtaaagttgaaatagagccgaatcctgaggcttgcacatacgtaaaggaaggtcagatccggctgcaggaagagagtggccctggaattgtgccagattgaaagcaagaaacagagattgaaagcaagaagaaacagtaatggagagcaagaaacagattgaaagcaagaagaaacagagattgaaagcaagaagaaacatagattgaaagcaagaagaaacagagattggaagcaagaagaaacagagattgaaagcaagaagaaacagagattgaaagcaagaagaaacagagattggaagcaagaagaaacagagattggaagcaagaacagagagaggaccggctgcaagaatccccttcagagcgagggacacaaactgctcaggactttgaatcaatcctctttcaccatctcatcatttctggctgtttcccagaagacttggttaataaaagcttttcttccctccacaaaactttcccacagtacttacgggtttactctggcttctcttgatatccctcaatggacttggctctgttgaccttccctccttgcacaatcggtgcaggcagggcaagggggtgggtgtcaggggctggttctctggagtggatggacatttcagagaggcatagagaaggtgctcttggtctggggctggtgaactgcaggtgggttctgcaaagggagaatttacagtttatggagaaccggaggctgaattctcagggctcctcattaaataagttgttttattgttgctcaattctccaagcagttcagctccttggaggccaagcaatataaataaaaagtgtttctgccagttcattccccgtgggctcacctttgggactagacacatattcctttctattcgatggttttcatctcccttagaatgaacatccttcccccaacactggaaatgacccctcttccagggcacatctcaggaaccacctcatgaatctccaagtttctgagggacactcggtttccagtgttagacttagacatatggttttgtcccctaaccacattcaaccaaaatgagttttttttttttgttttttgtttttgagatggagtcttgctctgtcgcccaggctggagtgcagtggcgcaatcttggctcactgcaagctccacctcccgggttcacaccattctcctgcctcagcctcccgagtagctgggactacaggcgcccgccaccatgcccggctaattttttttttttttttttatagtggagatagcgtttcaccatgttagtcaggatggtctcaatctcctgacctcatgatccgcccgcctcagcctcccaaagtgctgggattacaggcgtgagccatggcgccaggcccgaaatgagctcttaactgcagctttgtcctggcttctattctggacactggagacagattctggagaaaaattaatgggccatttcccttggtagagagtaaaaaaggctcattttggctgcagagttagcgttttcttgtctcagtttctctgagttcagttattcggtttcttcatctgggctaaacacattcatatttttaatccacatgatctaattttttgggctatatttctatgtatgttatttggagcatttcttcccaatgggaaggaatttggataaaaaataatcagcacctgacagtgactaagagcatgcactggcaaacatttttgtaaagggctcagtggtacatattttaggctttttgggtcctatgttctctgtcacaatacttaactctgccattgctgtgaatgcaggtgtatgcaatactgacactaatgggcatggctgtttgtattagcctcctgtggctgctgtcacatgtaaccacaaactgggtggctgaaaacaacaggaatgtattctcttatagttctggagtccagaagtccaaaatcaaggtgcaagaagggccaggcttcctccagagtctctaacggtgattctgttcctcggcttttccatgctctatggctccaggtgttcctgaccttgcagctgcgtcatttcaatctcctctgtctgtgtcatttggtttcctctgcacctgtgtgtgttttctcctgtgcatgtcgcttataaagacactgtgtcattgaatttaaggtccacctggataatccaggatgatctcatctcaggatgcctaattgtatctgtaaagactcttcatccaaataaggctacattcactggcactaggggtgaggatgtgagcttatcctttaggggggccaacattcaactcaccaaacttactgtgctcaaataaagcctttttacaaagaggctgtgggtaggatttggcctgtgggcagtagtttgctgacccccagcttagagggtagattcagatacagggagctgataatcacagaggacactaaaatttaaagaaaagttaaatatggcttcatttctgctactgtaattcacctattaaaaggactgtcagactatccaccatactctaatcttttattatgcaagctgtaaatacagatgaagcttcacttgctcacctgctgctcacctcctcccgtgcggcctagctcctaacaggctgtggaccagtactggtctgtggcccaggggttggggacccctgcactaagttatttactactgtggacctatggggtgtaggtgctttttattgagcttcctggtgtgtgttgttcagtctttgctgcagtgactggggcagctctgcttcatgctgtggacaggctgggatggttctactccatatgtcttgtcagtggattagcaagggcatgctcttattgaaatagcagagactttactgctcagcagaaatatgcaaggtctcttaggggctacacttagagctggcatgctttctataatctcttccattgagggaagagagagaccctctcatattgttttatattgttttatactcagtacctgttttaagaaaaaacaaagaagtgaaatcaaagacaggcagcccggtgccaggcccaaaaccaggcctgggcctgcctggcctaaacatagtagttaaaaatcaactcatgacttagaaaccgatgttatccatagattccagacattgtataaaagaacattttgaaactccctgctctgttctgttccactctggccaccagtgcatgcatcccctgtcacgtaccccctgcttgctcaaatcaatcatgaccctttcatgtgaaatccttagagttgtgagcccttaaaagggacaggaatttctcactcggggagcatggattttaagacgctagcctgccgatgctcccagctgattaaagccactcccttcactatctcggtgtctgaggggttttgtttgcggctcgtcctgctacaccataatatagaattagagggaacacttcctaactcattttatgaggcaaaagttatcctggtgatggctgggcatggtggctcatacctgtaatcccagcactttgggaggccgaggcgggtggatcacttgaggtcaggagttcaagaccggccttgccagcatggtgaaaccccatctctactaaatatacaaaaaattagccaggcaaagtggtgcacgcctgtagtcccagctacttgggaggctgaggcaggagaatcacttaaacctgggaggcggaggttgcagtgagccaaggttgcaccactgcactccagcactccagcttgggcgacacagcaagattccatctcaaaaaaaaaaaaaaaaattatccgagtgtccaaaccagaaaacatttacaagaaaggaaatcttcaaaccaatataccatatgaacacagatgcagaaattctcaacaaaattacaaaattaacaaattaaatccaaaatatacaaaaataattatacactgtattagtccattttcatactgctataaagataccaccctgccaggcgcagtggctcacacctgtaatcccagcactttgggaggctgaggtgggcggatcacaaggtcaggagattgagaccatcctgatctaactcggtgaaaccctgtctctactaaaaatacaaaaaattagccaggcatggtggcgggcgcctgtagtcccagctactcgggaggctgaggcaggagaatggcatgaacccaggaggtggagcttgcagtgagccaagattgtgccactgcactccagccccagcgacagagtgagactccgtatcaaaaaaaagatactacccgatactgggtaatttataaacaaaaaaggtttaattgcctcacaggtccttatgactggggaggcctcaggaaacttacagtaatggaggggaagcaagacacgtcttcacaaggcagcaggaaagagaggcagagagagagaaggggggcgtgccagacacttatcaaacagccagatcttgtgaaaactcactcactatcacaagcacagcaagggggaaatctgcccccatgacccaatcacctcccaccaggccccttccttgacacatggggattacaatttgagatgagatttgggtagggacactgagccataccatattgtacaccatgaccaacaggacttaggttaggtcagtctctttaataaatgccattgggaaaacttgatatccacatgtgtaagaatgaaattggatcctatttcacaccatatacaaaattcactcaaaatggattaaagacttaaacattagacctgaaactatagagctactagatgaaaacatagtggaaagactgcatgacattggtctgggcaataatttttgggaaatgaccccagaagcacaggcgacaaaaggagacaaaatgtaaaatgagattacatcaaactaaaaacttctgaatggcaaagaaaagcaatgagcagagtgaaaagacaacctatgggttggcaggaaacattcacaaaccatccatctgataagggattcatatccaaaatatataaggaacccaaacagctcaatagcaataaaacatatatcctgatattaaaaaatggacaaagaacctggatagatatacaaaatggccaacaggaatatggaaaatgctcctttatttatgtattttttttttgagacagagtttcattcttgttgcccaggctggagtgcaatggtgcgatctcggctcactgcaacctccacctcccgggttcaagagattctcctgcctcagtctcctgagtagctgggattaaaggcacccaccaccatgcccagctaatttttgtatttttagtagagacgggggtttcaccatgctggccaggctggtctcgaactcctgacctcaggtgatccacctgcctcggcctcccaaagtgctgggattacaggcgtaagccaccatgcctggccgggaaaatgctccttaactgaacggacctcctcttggccaaaggaatcccagaaaaacttttaaaacttcacttccagccatgacgggacgagaggtcaaacacacctcgttataccccttccttttcatggttcactacacaacaaccaaccagcattaataaaatagagaccatgagactggcagaacagacttcttgcggcaataagatacccaattataagcagggcctaacgccatgcccggcaagcattaagtcacacaccctacccttaaagaataatttatgttctacctgccaaatggtttttatttttctctagcagctaaacaagctctggactcagggtaagcaatattaaaacaatttgcagctccaccagatactaactgacccccagcccctattccagcagccataactacagctttgattgggcaagagactgattgggcaactttctcctgataagaccactgactgtggactggctctggctcgtctacagaggctgctcacttgcgtgcttttctgttctgaaaagaacttttgagggatagggtctacttgtaatacatttaaatgttaaagtctccactccaaagtgggcatgggttgtatgttgcatgagtgtttgtttcatacacatgcaccagggccagcttcatgaatattcatatctcctcctataacctgttgaatatgtatgtctagccaacccattgagcataaagctcttagctcttaccccaacccctcctccttagaaatgcctgtctctctggtattggctagaggctatgcttcccactctgtgggattgccatcttgcaggctgtaaccctttacaagaaataaagtctcctttccttttctaaatttataaattgtggggggtttaaaagttaacatagccacataaacatgtttcccttagtttagaagggaaaaacaattttctggagatatcaagggctgtgtccccaccgcaagtcaatgctttttgatgatcctaaggacctaatcaagagagtttccttgagtctctgagtttgtgcgtgtgtgtgtgtgtgtgtgtgtgtgtgtgtgtctgtgtctgggtgtgtgtgtgttgagacaaggtcttgctctgttgcccaggcaggcgtacagtggtgcaatcatggctcactgcagcctctacctccccagctcaaacgatcctcccacctcaacctcccaggtagctgggactacaggaacatgccaccatgcccagttaattttgaaaaaatgttttgtagagatggggtcttgctatgttgcccaggctggtcttgaactcctgggcttaagtaatccaccccacttggcctcccaaaatgttgggattacagacatgagccgccatgttctgctgagtctctgactttagaggaaactttcagtgaaaggagcgtaccccataagtgtatatatctactatatacccacaaaaattcttttaaaaagttaaagaaaggagtgataaggtgtgtgatggttaatactgagtgtcaacttgattaaactgaaggatgcaaagtattgatcctgggtgtgtctgtgagggtgttgccaaaaaagattaacatttgagtcagtgaactgaaggaggcagacccaccctcaatccgtgtgggcaccatctaatcagctgccagtgtggctagaatagagcaggcagaagaaattggaaggagccgacttgctgagtcttccagctttcgtctttctcccatggtgaatgcttcctgccctcgaacatcagacctcaagttcttcagcttttggactcttggacttacagcagtggtttaccagaggttcttgggccttcagccgcagactgaaggctgcactattggcttccctaattttgaggttgtgggactcagattgtcttcctttctgctcagcttgaagacgatctattgtgggacttcaccttgcgataatgtgagtcaatactccttaataaactccacttcatatatatatctatcctattagttctgtccctctagagaagcctgactaatagaaggtgctaggaggttagatatctggaaggcaggtgagttattggagaaggagtaaaaattaatcaaataaataaataattgggttcacctaatgtctaacatggtctcttgggaacagagaatgagcaggaaaaatttccttactgtccagacaggagtccacagagaaatcagacacttacgggttagtaagttccagcagtaagaggggaggtgcctaatgagcagatacagggagctgtggccctcagagaatacaatagagaaaaaaaatgtctaacaaacccactaatagattaaccctcacaaggaaataattgcaaagtaaagcttgctatcataccccaaaagtaggctagctaatctgagtcccagactggggactgggctgaatgggacccttcagcccattccaggtgggaatggaagttcaattgttaagactctgcacaggacatgatctcattcctttttatggctgcatagtattccatggtgtatatgtaccacgttttcttcaaccagtctgttgttgatgggcatttaggtcgagtccatgttttcactccaattaatggatctactttaaaaaatagtggtcatcttttgccgctatgtagaacataaatctggctagaggacctatgcctcactctttcctgctgtctcgtctggggacagagcttcatcctctatcatcaaccattcagggtaaaattcagacttccatctggagatcctcttctctgagaccccatccaggtgagcccaggagccctcagcaggtttcatgggaaaggttcagagagaacggaagctgggaatgtttacctgaagtcacctgagagccaatccaacttaggccagcgccaagaggttgctatgtttgtttgcttagttgactgattatttcataatcaatctatttagtatgctaaaaagagcagtgtctgttagactcagcaatgcagagaccactgctgacaattaagtggtgggaatggaattccaattggtaagactgaagaaggaatgggagctaaaaagtggtgctggtaacatcagttcatagtcaaggagttttgcaggtaagagagaaaaaaaactgagtattaagtgtaaaggatatgcagcaaagtgagggcttttaaaatatttttaatattgggtgtattttgagtatgttcctgtatccattaaaaagatcacaccaatgtattatttgcaaatgctaccttgccacagcagttaataagtcatacattttatttattttatttatttatttatttatttatttatttatttatttatttttgagacggagtctcgctctgtcccctagactggagcgcagtagtggcacgatctcggctcactgcaagctccgcctcccaggttcacggcgttctcttgcctcagcctcccgagtagctgcgactacagttgcccgccactacgcccggctaatttttttgaattttttagtagagatggggtttcaccgtgtaacccaggatggtctcgatctcctgacctcgtgatccgcccgtctctgcctcccaaagtgctgggattacaggcgtgagccaccgcgcccggctgataagtcatacattttaaagtatcttttctcatgcgggttatccagatgaaaaaaatatgtttatttaataagtgaaaaggggtatgatagcaagctttactttgcaattacttccttacttgtgaggcttaatcgattagtgggtttgttagatagttcctgtttctattgcaaacagtctttgcgagatctttgcttttgtatagcgagtttgcagtgttttcattcctgtatttgattgcatttttttcaaacataagaatgggagttggtgaacgttttttcaccaacgttgttgtttgccatttagttctttttgtatttatagatgcgcttggggtgaatgcgttaaagtttatcagttttgtgcggtcaggtctatcagtgggtcacactgtgtatctcccttctgttgcattttagatagtttagagagtttaaaaagctttctacatatttcatcgcaataaatcaccttttatatgtatttccaccttatttcacacatttttttctttcttttttattatactttaagttttagggtacatgtgcacaacacgcaggttggttacatatgtacacatgtgccatgttggcgtgctgcacctattaactcgtcatttagcattaggtatatctcccccctccccctgccccataacagtccccggtgtgtgatattccccttcctgtgtccacatcttttttctttattgccacctttcttttttcttttttgcaatcagatctattttttttaaatttaaaattttattttaatttcgggggtacatgtgcaggatatgcaggtttgttacataggtaaacatgtgccatggtggtttgctgcacccatcaacccatcacctaggtattaagcccagcatgcattagctattttttttaatgctctccttcccctcacccccaccccctgacaggctccagtgtgtgtcgttcccctccctgtgtccccgtgttctcactcttcagctcccagttataagtgggaacatgtggtatttggttttctgttcctgggtcagtttgctgaggataatggctttcagctccagccacatccctgcaaaggacatgatcttattcctttatatggctgcatagtattccagggtgtatatgtactacattttctttaaccagtctattgttgatgggcatttaggttgattccacgtttccaattaatcagaactacttttaaaaatagtggttatcttttgccactatgtggaacatattcttatacccacgttgagatttcctgtgtattcttcatgtaagcatattttaatccatttcagtttgtataagatgaaatcataactttacatactgttgttttcttccactgctttaagaaagtatatttttatattctttcatttccaagtttttgtcaacttaatctcaaattcgaaacccatgttgatgtgattaatggttattttctatctttttctttgatcatttattttatttttatgcgtttatttatttatttagagatacagtctcgctctgtcacccagcctggagtgcagtggcacaatttcagctcactgcagcctcaacctcttgggttcaagtgattcttgtgcctcagcctcccgagtagctgggattacaggcatgcgccgccactctgcccagctaattttttgtatttgtagtagagacagggttttaccatggcagtcaggctggtctcaaactcctggcctcaggttgatctgcccaccttggcctcccaaagtgctgggattacaggcatgagccactgcgccgggatagatcatttattttagaattttattcagttttgttcaatgtggttgttttgaatccaccttatttaaccaagctttattttcccagccattccttttgtttaataagttcttaatttaaaaaaatgtgtttctcaatgaaaatacatggacatggggaggggaacatcacacatgggggcctgttggggggtcgggggcaaggggagggagatcattaggacaaatacctaatgcatgaggggcttaaaacctagatgacgggttgacaggtgcagcaaaccaccatggcacatgtatagctatgtaacaaacctgcacgttctgcacatgtatcccagaccttaaagaaaaaaaatcacacaggaaaaaaaaaagtgttcctatgtagacgtacaactttttgtgaaaccacaacagtgaagaaagcaggtgaaatccctgctaatttagatcttaccttgtaatggaaagggcagaaaacaatggaataaatgtgtgtctgacataaagtccccagaggtaagtcatatgaagaaaaatgatagattgtcgtggcaggggcaggattttctaaagtatggtctggggaggtctttgcatcttgcacgaggaacggaattggactagagagtgcccactggatttgtcagaaaagagggaaaaactcaatacctgggaattacaaagaacagatcccacaaggaaaagtgagagaaaggcctgcctcatctactactggaccatataaaaacatgtgtgggccgggcatggtggctcacacctgtaatcccagcactttgggaggctgaggtgggtggatcacgagacctgcctggccaacatggtgaaaccctgtctctactaaaaatacaaaaattagctgggtgtagtggcaggtgcctgtaatcccagctacttgggaggctgaggcaggagaatcgtttgaacctgggaggtggaggttgctgtgagctgagatcgcgccattgcactccagcctgggtgacaagagtgaaactctgtctcaaagcaaaaataaaaacaaaaacaaaacatgtgtggtccataaatatggaatagatacaggaataacaattagatcaggggtctgatgtgaattctgtaatgaggcaagtggatcaatgaaattctgctcagggtatgggccctggagtccggagataatgtcagttctacgctggctacctgttctcccaacagtgtggctcttctcttgagctcttcattcaggctgcatttcccaggaacttgccttaaaaacaaaaaacaaaaaacaaaacaaaactattccgcctttactgcagtggattccacactctttgtgtctgaaagtaagaaataccttttacatcatgagccagcatgcctgcacatgcaaatatacacacacaggtggctgaagaaagagtatcatgaaactagtttgtaggtacccttatcatatatgatgtgcttgaatattttcttctgcattttattcattctatgctatttaaatcttacgtaccatagcacaacccctcaatcagtcccaatctcagaatatggacaacattctcctagtgtgtcctccacacctgtgttagcatctccctgtatcttttatttcctcatcagcaattgctgggacaacacaaaatgtccctcaccattgtcaccattcttctttctacttctatgagttcattatcattttaagattccccatgtacgagtgtgcagaatttgtttcactgtgcctggcttatcatttaatgtaatgtcctccaggttcatccgtgtggtcacaaatgacaggatttccttctttttaaaggctgagtggtgttctattgtggatatgcaccacgtattcttgatctattcattctttggcggacactgaggttgactccatatgttggcttttgtaaatagtgttgcaacgaatgcggaagtgcagatatctcttcaacatactgatttcatttcctttggctatatatgcagtcatgggattatacacatatggtagttctatttttagttttttggagaacccccaactattttctataatgcttgtactaccttaagtttccaccaaaaaggtacatgggctcccttttctccagatcctcatcagcacttatctcctgtctttttttttttttttttttttttttttttgagatggagtctcgctctgtcgcccaggctagagtgcagtggtgcgatctcagctcactgcaacctccaccacccaagttcaagcaattctcctgcctcagcctcctgagtagctggcattacaggtgcccgccactgcgccggctaatttttgtatttttagtagagatggggtttcaccgtcttggccaggctggtcttcaactcttgacctcgtgatccacccgcctcagcctcccaaagtgctgggattacaggcatgagccaccgcacccagccacctgccttttttataatagccgtcctaacaggtttgaggtgacatctcattgtggttataatgtacatttctctgataatcagtgatgttgagcattttttcatgtacctgttggccagctgtatgtcttctattgagacatgtctcttcatgtcctctgcctatttttttttttttaaactgggttacttgtttccttgatgttgagtttcttctatattgggatattaaccccttatcatatgtgtggtttgcaaatgttttctctccttccataggttgcctctctgttgattgttttctttgctgtgcagaaggtttttaatttgatgtaatcccacttgtctattttcactttcgttgcctgtgttttgaggggtatattttaaaaccattgcccagactactgctttctgcctatattttattctggaaggtttatagcttcaggtgttatccttaaatgtttttaaaaatttgcgtaaattggttgggtgcagtggttcatgcctgtaatcccagcactttgggaggctgagacggtcagatcacttgaggtctagagttcgagaccagcctggcaaacatggcgaaaccccatctctactaaaaataaaaaattaggtgggcgtggtggcatgtgcctgtaatcccagctactcgggaggctgaggcaaaaggattgcttgaacttgggaggtggaggttgtggtgagccaaggttgtgccactgcactccagtctgggcgacagagcaagactccgtctaaaaaaataaaaaataaataaaatttgtgtaaatttaaggggtgtaagtgcagttttgttacatgggtattttgcctagtggtgaagtctgggcttttagtgtaaccatcacccaaatagtgtacattgtacccattaagtaatttatcagtcctaaccccctctcatcttcccacccttctgggtctccaatgtctattattccacattctatatttatgtgtccacattatttagctcccacttgtaagtgagaacatgcagtatttgactatttctgagttatttcacttaagataatggcctctagtttcatccgtgtttgagtctttaacctattttcatttaatttttgtatatggtgtgaaatgagggtctaatttcattcttctgcatatggatatccagttttcccagcaccgtttattgaagagatggtactctcactattgtgctttttttttttttggcaatttgtcaaaaataaaaattggctgtaaattcatggatttatttctgggctctgtattcttttccattggtcaatgtgccccaatacagtgtgctttccatttaccttttcccctctgattcacatgaataataaaacaaagtccccagattttctagataataagtgtatccatacatggagctccctaacttttatggctttcacccaagggacaggatcctaaattatttagctctgggagttgatggggctctgcattcatgaatcccttgaaaccaaagagaacaaagaggtaactttctttttcaacttttattttagaatcatggggtatatgtgtaggtttgttacaaagatatattgtgtgacactaaagtttggggtatggctgaacccatcacccaggtagtgagtacccaagaggtagtttttcagcccttttcctactccctttctccccactatagtagtctccagtgtctgttgatcccaactttatgtccgtgtgtacccaatgtttagctcgcacttataagcgagaacatgaagtatttggttttctgtttctgcattagttcacttaggataatggccttgagttctctccatgtagctacaaaggacatgtttttttcttttttatggctgcatagtattccctggtgtgtacatactacattttctttatccaatacaccattgatgagcacctgcaatgattccatgtctttgctattgtgaatagcaccacagtgaacatatgggtgaatgagtccttttggcaggatgatttattttcctttggctatatactcaataatgggatttctgggtcaaatggtagttcaactcagttttttgagaaatctccaaaccgcttcccacagtggctggactaatttacattcccaccaacagtgtataagtggatattatgctcatgaaataagccagagagaggaataaaaaatgctacattatttcacttatatgtggaatctaaacaatgtcaaatactgaccaggtgtggtggtggttcatgcctgtaatcccagcattttgggaggtcaagatgggatcaccatttgaactcaggaatttgagaccatcctgggcaacagagcaagatgtcatctctactaaaaatatgaacaagtgagccaggcatggtggtgtgagcctgtggttccagctactcaggaggctgaggcaagaggatggcttcagcctgggagatcgaggcttcagtgagctaccatcacaccactctacttcagtctgggtgacagattgagatcttgtgcttaaaatgtaaaatacatagaaatagagagtacaattctggttatggaggggtgagaatgggaggagtggggaatgggaaaatgtgggtcaaaacgtacagagttgtggttatgtaggatgaataagcctagacatctaatgtacactatgacgactatagttaaaaatattatactgtacactgtgaattttctaagagtagagtttaggtgctctttccaccaaaaaaggtaactatttgaggcgatggactcaggatcttttcatttgctttagccaaaagaatatggtggaattgagtgtccctcaagggaacttggcatgtttctgttgctctctcctgtaactctgcctctgccatgcaaacaagtccaggccagccagctttaggaggagaggacatgtaaagccatgttaagacagttggcaagctgtcccaactgtggccaccctaggtcagcccacagccaacaagcctccaaatgtaagagaactcgggcaagatcagcaaagccctactgttgactcacagctgactacagcttcatgaggaggacagcagagaccagaagacacccccaacgtagactccctatgagacaagaaaagcatcatcttaaaccatttactatgagatgacttgttattcagcaatagcttactgatacaataagcattgcaaataggactgaggacattcagaatagtctgctgcttcttattttggcatttgttctaatacttggaagcattcatgattccctggatactcatgtataattcagataactgtattaaaaaaaagactactgttgagattccccatctaggtgatctggagaggttagaatgagatgtatgttttttgcaggaataatttgtgcacctgaatcacaattttccattcccagagacataacgggataagttaaaggtttggtgtgagtcacccttttcacctgaatcacaattccccattcccagaggcatgactggggagaagctcaaggttttgtgtgagtcattctttaatcatgagtatttaagagaatttagagcataaaagagatgaataaattgatgatacattgaatattgttcactgacctgcactttaatgtttacgacaaaattttataatgaaggaggtattttggttagtgggatagaaggattcgtatttgtagggagcactaaaaattttgaagcaaaaacagaagtatggatgcatgaaacattatagaccatggcaccaaatccatcactccaataaataaacttatatatgggcactaagcttccatacttcaatgagtccatgcacatcataaaaacaagtcttccatagcaattcaatgtatgattgacaattttactccatcatatttaaggtcatctctgactgtaagtccatattaagttaatcaacatatgcaagtttgtctttcagtgggcattgcactcggaacatatttttgataaacaatttttgccttaccgtactatgccagggagtatggcagatactgtggacatggcactgacaaagacatgatgtcctaatgaggacaacacaatctcatgaccagctgcaaaatacacaagtatgttcaggtctacattatcaggaggagcattgaaggtagagacagacataggactgaagaatacaaaagtgaacaaattgtggtctcaggtcatattccactataaatttacatcaattaccccaattgccaagtgtagtctatgccacaggagacatacaactcttccctgtatgagacaaatggaaatctccaaagtgtttctgatccaaagtcggaaataaccttgagaaagtaggaaaacaacaaagagaaaaaactgttggatatcagagagcagaaagcttaataaaaggagttgcttaaattctacaagaccagttgaaatcacaacaaattgaaactcccagaaatataataagtattaatagaaggagcaagttctatttccactatctgattgaagaatgacagttactacctctgaagcttagagccctgcaatcatgggcacttcttgaaaaattgccctttcattgttccccacaacaaatgtattcccagagccctctttatgtctttattcctcagactatagataaaggggttcagcatgggggtgaccacagtgtacatcactgaggctgttgcacttgagtgtgagttgcgggtggcagcagaactaaggtacacccctaggattgcaccataaaataaggagacaactgagaggtgagatgcacaggtggaaaatgccttgtacttcccctgagctgatgagattgcatgtatggaagaaattatcttagagtaagagtaaaggatcccagtcaggggacctccacccagcagcgcaactgtaaaatatatcaccatgtgattaagaaagctatcagaacaagcaagttggatgacctgattaagttcacagaaaaagtgggggatttctaaggctgtgcagaaggacagccgtactaccattaagatttgtagcaaggaatacagagcactcatggtccaggatgctagaaccagcagtccacagaggtgagggttcataatgaccatgtagtgcagggggtgacagatggccacaaaccggtcataggccatcacggacaggaggaagttttcaaatccagcaaagagtatgaaaaaatacatctgcatgaggcaggctatgtaggtgatgactttgttctgtgtctggatgttcatcagcatttttggaatggtggtggaagtaacacaaatgtcagcaaaggacaggttggagaggaagaagtacatgggggtgtggaggtgggagtctgagattgtggccaggatgatgagcaggttcccgagcacagtgaccaggtacatggacaggaacagcccaaagaggaagggttgcagtccaggttcttgtgaaaatcccagaagaagaaattctgaaatttgtgtatcatttcctggttccatttgattgaagtgactatcagagagagagagagaaagagggaaacgagacaggcatgcattgctaacctttcagaaataccatcatttatattttatagccaataaattatcttacattttgtgtatgaatctggttctctttaagggatctccatgtcatctctgattaggaactccttcccactctcagccttaactgaagacagcgtacattctgcagttagaataagaacttctggctgggcacggtggcttatgcctgtaaccccagcactttgggaggtcaaagcaggcggatcacgaggtcaagaggttgagaccatcctggccaacatggtgaaaccctgtctctagtaaaaatacaaaaattagcctggtgtagtggcatgcgcctgtagtcccagctacttgggaggctgaggcaaggagaatctcttgaccccgggaggcagaagttgcagtgagctgagatcatgccactgcactccagcctggtgacagagcgagactccatctcaaaaaaaaaaaaaaaaaaaaaaaaaaaaagaatgagaacttcttctatgaatttgaggaatataaattgaatgttgaccatgttcttgtcactgtctagataatgagtgaacaatgctgagaaacaaaagtccctacaatctaatgatgaagaaagaatataaacaaattaaacaatcgaatataaacaaattaaacaatcacataatatgtcagatgggaacaggcgcttggaaaataaacaaagcaggtaaaaaggagggagggtatgaagtgtttcttttgttttttgtttgtttgtttgctgattattattcaagacctgcaaacaaggtgatgtttgaaaaaagatctcaaggaagacagggcaagattcatgaagttatctgttgaagtgggtgcctggcaggaggaatggcagtacaaaaactttgagggatgtgcttctttcttgttttcttttttgagacagagtctcgctctgttgccgggctggagcgcagtggcgcaatctcagatcactgcaacctccacctcccaggttcaagcgattctcctgcctcagcctcccgagtagctgggattacaggcatgcaccaccacgcccagctaattttgtatttttagtagagacggggtttctccatgttggtcaggctggtcttgaactcccaacctcaggtgatccgctcacctcggcctcccaaagtgctgggattataggcatgagccactgcacctggttgggacgtgcttctttcagatgttcaagtccaacacagaagccagtgtggccagggaatcagtaagacggagagtgatgggacatggtgtcagaggatgttgcagaataaggggacctggctgtcaaaacatcaagggacaaagtgtccatctgtctagatgctgttgcacctgcactttattaactggactagaaaggtgtcacatcaattgaaatgcatcccctctttatttccttctggtgtcttgggttctggcctctgtttcattggtctcctttataataaaatatattgaggccaggtccctcttgctctgaaacctgctgtcactccaaagacatgcagccacacactcactcacacacacatatacacatgcagcacactggccgaagagggcccaggcaggagtgcagtggtgtgatcatagctcactgcagcttcaaccacccaggctcaagccatcctcctgcctcagcctcccaagtagttgggaccacagccatgtgccgccacccttggctgatttctacattttttgtggagaccaggtctgcctatgttgcccaggctggtcttgaactcctggcctcaagtgaaccttccactttggcctcccaaagtgctggaattacaggcatgagctactgcatttggctcaaggaaagcttttaatatcagattcttttttccctacagaatgtagaattggtacaagaaattccagttcacaagtctgtatacacatgtaaacttggacttccattttggtatgactgttttcagccctgtgtttaaagaaacataaaagagctgttcaataaacagagtgagagaaattaaacagaccccagtaaggaaaaagtctaataaactcaggtaatccctcagcaaaaggacaaaaatacattgcaagggtgcaacgggtaggttagcaagaaaggaactgactccaaggagacaaaggcttgctggggatcttataggatggaaaataaaagcgaccctggttatggttacatttcagcttccattgtatctcctcgatgcctggcaaaataaataaaagatcaaaaataaagaattctgacatctttattgacttcatggtttttaatttaacaatagtatttaattatgtcggttttaatgattattaaagttttagctttccttttggaactagaaataagtaaataaagttatccaaaagacaagactgtggagtcctaattagggaaatggagtcaggctggctgaagcagggaaaaacaaaaagagaagatagataagctctaagtctgcctttcttcatggtccaggacacacaaccctcgtgtgccaatgactcacaatcttcctgcacccgtcttatcacctgaccctcagctgatggaaaaatgcaagttagctcactgcaaccttggcattatcagtaccgcacaaagccctcttcagctcgcagcacaagcactatcctataaaatccccagcaagcctttgcctccttgcagtcagctcctttcttgctaacctgcccattgcacccttgcaatgtattattatcctttctctaattaaatttgcctttctttatctacaactgtcttggtaaattcttactgcctacatgatgccggccccagatagctgctacccatgacaaaaactaatgataccttttttggcaacaaaggtacagatcgcatatcctaatagaaaaatggagcaaagagaataagccaacaattcacaaaaagaaacatacaaacaatgacaagatttgggcatttttatatgaaacagtaaaagactcatttttttctgtgcctattccatatttacttgatcaattggtttttatatgaattgagagtggatgaagcagtccctttctcacttttcttgtatttcctgtgtggcctttattttattttattattttattattatttttttgagacagagtctcgctctgtcgcccaggttggagtgcaatggtgcaatattggctcactgcaagctcagcctcccgggttcacgccattctcctgcctcagcctcctgagtagctggcattacaggtgcccgccactgtgcccggctaatttttgtatttttagtagagatggggtttcaccatgttagccaggatggtctcgatctcctgacctcgtgatccgcctgcctcggcctcccaaagtgctgggattacaggcgtgagccaccgcgcctggcctattttattttttttttgctacttgtggactttgaattttgatcacttttttgacaaatccaatgagcttgtttctggtctttgtccaacatgaaaatgcctgcccagaccatattacatattaaattttgcacacgtcatgactattctattctattctgttgtattctatttattcattgttgagatagggtcttactctcttgctaaagatggagtgcagtggtgcaatcatagctcactgcagcctcaaatttctgggcttatataatactcatgcctcagcttcttgaatgactgggacgaaaggcatgtgtcaccatacctagctaattttgttcatgctttgtagagacagggtcttgttttgttgcccaggctggtctcaaactcttggcttcatgtgatcctcccagctgggcctcccaaagtgctggaattataggcatgagtcacctcgcttggcctgacaattctattattttacactaagaaatattctttatttgatttacaccttatgacattgcatcatgcacctttatttaattctactgtattttcaccattatagcacaaggtcaaaatgagcagggatgttaccatggatgttcacttatgtatttttttccctccttccctccctccctcccttccttccttctctctctctttctttcttttttcttttcttttttttttttaatggagccttgctctgtcaccaggctggagtgcagtggcgcgatctcggctgactggcaacctccgcctcctgggttcaagcgattctcctgcctcaacctcccaagtagctgggattacagtcatgagccacaacacctggctaatttttgtatttttaatagagtcggggtttcaccatgttggccaggatggtctcgatctcctgaccccgtgatccacccacctcggcctcccaaagtgttgggattacaggcctgagccacagtgcctggctaccttcatattttcataaaaagatgtgacgatgtatgcattattaaaaaaagaattataaaattagaaagaatggcaggagaataaaaccaggttaaatataatcaactgtagtgaataaaattgttgaagtattgaaaattaactgacatgctataataataatttaatcatatcaacataaattaataaattggcaaaaatctagatataaaagaatatggcatacactgttcataaaaaactcttgcacagagcagatgctcagttattatttgctgaatgaatcaggactttgttctcagtatacatgggcatttaatatacagcaagcttgtatttcaatttagttagaaaggattggatatttaaataaatgctgtcataaacagctatttgtctggaataaataaaattggtcacctacctcacacatcttacacaaagtcagaggaattaaaaacttcaatatcggccaggtacggtggctcatgcctgtaatcccagcagtttggaaggtccaggtgggtggatcacttgaggtcgggagttcaagaccagcctgggcaatatggcgaaacgccatctctaccaaaaatacaaaaattagatgggtatggtggcacttgcctgcagtccaagctactcaggaggctgaggtgggagaatcgcttggatccaggaagcgaaggttgcagtgagccaagatcgcaccactgcattccatcctggttgacagggcgagactccgtctcaaaaaaaaagtaaacaatgccttttccatgaaaacagggaaactacatatgaaatctgtgggtgggcaaatcaccttaactaaggcaataattgcagaagtaagatgataggtatatatttaactaaagaatattttaaactttttatggctaataaatttccccaaaagtcaactgaaaaagaatcattgaaaaaaataattttaaacgctggtaactgtataaaaatgggcatatagtaaacataaggcaatcaagatcttgatcaaatatatgaatatttgctcaaagtcagtaatattttaagaaaacagtaagaaatctcacgtccatcagcctgagcggggatggagtggggaactttctcagctgtcatagatttgtgttggaatttttaaacagatggcaaacgggtactctaattttggtgacagaaataagtgtcataatgtcttgtggaaacaatctccagacagataaaatattaaaaacacatacaggctgggcgtggtggcacacgtctgcaatcctagcactttgggaggctgaggcaagtaaattgcttgagcccaggagttcgagaccagcctggacaacgtggtgaaactccatctctacaaaagaaatacaaaaattagcctagcatggtggtgcacaccagtagttccagctacttgggagactgaggtgggaggatcaccggagccaaggaggttgaggcagcagtgagctgagatcatgctactgcattccagtagtagcatggacagaggcttgcacgacagagtgaggctctgtctcaaagaaaaaacaaacaaacaacaaaactccaaaaaccaggaagccagcagatattcctcgccacagtgtttctcaatctcagcactattgatattctgggctagatcactctctttgataaagtctatcctatacactgtgagttgtttagaagcatcaaatcacaggcctaaacaacacacaaatatattcagccacgcaagtgaggaaataaatgcaagtacagctcattagtacatagtctctcacctattaaatattttgtattatctgaatacctagcgtaagagaaaatcctgcaaaatatacgcattatgaactgctgttgcaaaatggtatttgcaagcaatccgttcatctggatttttctcacgggcatagaatcaaactgaaatatgctccattttaaaagtaaaaaggaaatgtctttacatgactgtatatccctccacagccaatacacgatttctctactccccttaattacaaagatgtatgttgtacttttacaaaaatcattttacacctcctattccttctaattgggcttctgtgaccttcactaaatgtcaatagtcgtcacccttgcattgcctagttcagtgttcacttttctttttttgcatcataaaacgagacattacttagttaattaatcaaccaagcaaataaccgcagcaatatcttggctctgggctaggctggactggctctcaggtgatctcaggtaaatattctctgcatctattccatctattgttttcctgcagttcccactgggctctccaactcaccaggaggggatctctccgaggaagagttccttgtgtaagtgcaaattcctcactggatgattgatggtggagactgaagctctgctcagcagactaggcagcaggaaagagtcaagcatctgtctctgagctagacttaggacttcaaaagaaacaatgatattccattcaacccaggggtgcctgagggacaacagcagatgaaatatttatagcttcccacatctgctcaataggcacatttcttcttgttatttgaaaccctgagtacattatgtccctgtgggacattgttttgcacagaaagaaaaaaaatcctgcagattctctgttcccaagagactggatgaaccagtctttcttactctttcaacatgaactctcctttcttccagaagtctaactttgtaacaactgtcccaatcctgagacaaagttttcttcacatctaagactgagaaacccatcttgcctactccccttaaatctccaaagcatcgacttattgtgggaatacagcctctgataccataagaaaatttctcttttttttttgagacggagtctcactgtgtcacccaggctggagtgcagtggtgtgatctcagctcactgcaacctccgcctcctgggttcaagtgattcttctgcctcagcctcccgagtagctggaactacaggtgctcacccccatgcccagctaatttttatatttttagtagagaaggggttttgtcatgttggccaggctggtctcgaactcctgacctcaggtcatccacccgccttggcctcccaaagtgctgggattacaggcgtgagccactgtgcctggcccaacatctgaaaatttccatctcattcttcaactagagggagtactgtgttcctttgatataaatcatggcttggctgtactccttggcttcatgatgttttcaccaaaacaatttgtaatttaatgcttgtcagacaaattaagaactgtcttttagttcttcattgataaaatgtgtaccaattacaagagatatatttagacccttttatgcacattgtcctgagaatggcaccttataaggattattttatctaatgtttataaatgtttattttatgtggtcggtactgtcatgagcatcattctacgtatgcagtaatggggctcagaaagattcagtgatctgctcaacattataaaccaagaaagggatgaatggttgaaactccttcatgatgttttcagttctcatgcttgaggccagtagtttaaaaacaggaatgaggctgcatgtggtggctcacacttgtaatcccagcactttgggaggctaaggcaggcagataacctgaggccggagttcgagaccagcctggccaacacggtgagaccccgtctctactaaaaatgtaaaaattacctgggcatggtggcatacgcctgtagtcccagctactcaggaggctgaggcaggagaatcacttgaacccgggaggcagaggttgcagtgagctgacattactcaagcctgggtgacagagcaaaactccatctcaaaaaaacaaaaacaaagaaacaaaaagcagggatgattttgccaccaaaggacacttgaaaatatctgagaaaactttagttgtcacaactaggaagatgttactggcacctgggggttgaggttgagaatgctgttcaagatccaacaatgcaaatgatacccccaccacaaatgataatccagcacaaatgttaacatggaggaagctgcaaacactattctagaccagaacatctccagcttcaaagtttatatgaattgcttctggatcttgttcaaatgtggattctaatttatcaggtctaggatggggtccagagattctacatgtgtattagtccgttttcacgctgctgataaagacatacccaagacttggtaatttataaaggaaagaggtttaatggactctggactcacagttccacatggctggggaggcctcacaatcatggtggaaggcaaaaggcatgtcttacatggcagcaggcaaagcgagaataagaatcaagtgaaaagggaaaccccttataaaaccatcagctctcatgagacttatttagtaccatgagaaaagtatggggaaaactgcccccacgattcggttagctcccactaggtgcctcctgatataggagttaagaaggaattacttaggcagatagcaagggcatgagagtcctcagtaaggcttttctcttttaatgaaaagcagcctcaaatcattttctaacaaagagcagcctgtaaagttgagctgcagacatagataagcaagctgggagtttgcatgggtgaatgctggcagaaactaaggactagacgttttcaagatggtggctccatcttcccttctctgccagccacgtgcactgtaaggagcagacaagatggtgtcatggcactggccaggtaaaaaccccatctgcataataaacaattggggtgggatggccagcctctttgcaggctatgtaaatgacacacttggtccaaccaatcccctgggccctatgtaaatcagaccccacctcctcaagcccctctataaaaccaaccgaatcccatgggcaacagggagatctgtttggaacccgcctccatctacataagggagcttttttcttgtttctttcatgtattaaactttccactattaaatccacacctcgtgcatctgcgtcttcattttccttagagcaggacaatgaaccttgagtatttccccagacaaacgatgccacttcaccattagccaaatacatctctgttcattataaattgcccagtctcaggcattctgctatagtagcagaaaacaaactcacatttagcttctgcatatacaagtttacatgtgtctcttgagtaaatccctcatgataggaaatgaaacttttagaactttcatttcttatctataagttctggaaatttcatcgatcctatgaagttattgtgaaaagtaagcaatattttaatgcttggaaagttactggaacagaataattgttcgatcaatagcagctattgttattgtctcagttttgcatttacttagctcactgtgacaccagaaatgtctcttgcgagaggatgtgagtctagtgttaccctgttcctgttcctggaatacagctagttgtgatcttgaagggagacctcatcccagggactcaaggaggggtcagaatgtggggaatccaccattccatgctttgttatattcaaggatgtagcctctgaccctattctttttgagactgagttttcctctgttgcccaggctggagtgcagtggcacaatctcggttcactgcaacctccacctcctaggttcaagcaattctcttgcctccgcctcccaaatagctgggattacaggcttgtgccaccacgcccggctaattttttgtatttttagtagagacggggtttcactatgttggccaggctggtctcgaactcctgatctcaggtgatccgcctgccttggcctcccaaagtgctgggattataagcgtgagccaccgcacctgggcctgcctctgaccctctaatgctgactccaaataaccacagcaagaatttttagactctttcaatccactttacttgttctgctcttgggaatatttgcaaagctgctatttcttgttgcatcaaattatttctataaattttctcatcctttttgttccacctccacagcatgtaattcacaaatgtttgctgccaacagaagtatgaagttcttgcgtgtctgtttctttctaggataatttttttttttacaattatttattaactcctctattctctgtaggaggactgtaaatcaccactatggactctgggtcttaagggtgcctcaattgtaaggagaacatagctcttcaatagttgacactgaacttggacatgtgacttcagctaaatgtgaatagtcctgaaatgtccaatgcctgagaagaagctgtaagagattccatcacttggctaggcacggtggctcacgcctgtagtcccaacactttgggaggctgaggtgggtggatcatgaggtcaggagatcgagactaccctggctaacatggtgaaacctcatctgtactaaaaatacaaaaaaaattagccaggcgtggtggcgggtgcctgtcatcccagctactctggacgccgaggcaggagaaaggcgtgaacccaggaggcggagcttgcagtgagccgcgattgcaccactgcactccagcctgggtgacacagcaagattccatctcaaaaaaaaaaaagagattccatcacttttcttgagcttcttctctcaaattgtccttgctgtccaaaggtcaagaacttgatttggatagccctatggactgaatatttttgtcccttccaaaattcgtatgtcccaagtccccaaagttaaaacttctccaacattgcctcctatgtgattaaaaaatagcatgacattaaaccattcactattaggatgacttgttatgcagtagtagcttactgatacaataatcaatgcaaacacaactaaagagattcagaataatctgatgtttctttgttctggacctttgttctgttatttgaaggaaatatttatgattacctggttattcatatttatttcagataactgtattaaaatgagactgcctattagattttcttcaggtagctaggagaggttgaaagtaaatatgttgggaaaacactgactttttttcacatgctaatccaccaggttacttttgagtaacgctgagtccagaaaagcctccaaaaatgtctagttgatggattactctttttatagaaatacgtgttcactgtaatttttgcctttcctccaaaacaacccttggtgttcttccatacatcataggctgcgatgcctgtagctgcttacacattccttccagagcacatataatgtttcctccaagatataagccccaggtctggggtggtggaggtgtggagatccacttttcctgcggccacctaagaccatgcttctgtctgtaagtttacctggtaaattaccctacccaacaaactggcttgtctgccttgtcctttgacttctcagatccttctgcacttgggaactgctttgcatatatagtcctttcatggaataacacatatgtttttgaaggaaagaactgtgaccttcaatcacaagtctctattcccagaggcaacactgggtagaaattcgagctcttgtgtgagtcatcctttgatcatgagagttgaagagtgtttagagtataaaagagacaaaacaactgaagataaagtaaatacatatattgttcacttgtcaacactttgatgcttatgacatttttaaggaagagatgttaggacaatggaaggagtcatatttgtaggcagcactggaaaacattaggcagaagtagcagagtgatgcaaggacattacatacaccatggcactcaatccttcactcagatgaacaaacctagtgacgcgtggacaccaggctcctctacttcaatgagtagatgtaccccaacgaaaacaaatattccatagttatttcatgtatgattgaaaattatattccgtcatatttaaggtcatctctgactctaagaagaacagtgtaagctctataaagtagttgaggaacaaagaagtttaaactccaggaaataaatggaaggggcaagtcttccttccaccatcttattaacaaatcaccatttctggctctggggcttagagctctgaagtcacaggcctttcttgaaaaatagcctttctattgctttcctctgaagaatgttttcatagcaccctttatgtgtttattcctcagactgtagatgaaggggttcagcatgggggtgaccacagtgtacatcactgaggctgcagcacctgtgtgtgaattgtgggtggcagcagaactaaggtacacccctaagcatgtaccataaaataaggagacaactgagaggtgagatgcacaggtggaaaatgccttatacttcccctgagctgatgagattgcacgtatggaggaaactatcttagagtaagagtacaggatcccagtgaggggaccaccgcccagcagcgctactgcaaaatacatcactatgtcattaagaaaggtgtcagaacaggcaaggtggaccacctgattaatttcacagaaaaaatgagggatttccatgtgtgtacaaaagggcagtggcaacaccattaagctttgtaacatggaattcagaacactcatgatccaggatgccagaaccagcagtccacagagttgagggttcataatgaccatgtagtgcagagggtgacagatggccacaaaccggtcataggccatcacggtcagaaggaagttatccaatcctacaaagagtaagaaaaagcacatctgggtgatgcagcctgcataggtgatgactttgttgtgtgtctggatgttcaccagcatcttcgggacagtggtagagacaaaacagatgtctacgaaggacaggttggagaggaagaagtacatgggggtgtggaggtgggagtctgagattgtggccaggatgatgagcaggttcccgagcacagtgaccaggtacatggacaggaacagcccaaagaggaaggcctgcaattctggttcctctgaaattcccaggagaagaaattctaaaattattgtattgttccatgatttcatcttgtgatgtgactaccagagagagagagagagagagagagagagtgaaagaacatgaaacaaacatgcattccaaaactatcagaaatgttatcatttatattccacagtcaagaagttaatatctttttcttaaaaaattatttttaagttgacagataaaattatatgtatttatcacatataacatgatgtgtttttaaaagttttatttagtttcagggttacatatgcaggtttgtaaaacaggtaacatgtcatgggggtttagtgtataggttatttcaatacccagtaataaccatagtacgtaataggtgttcgatccttactctcctcccaccttccaccctcaaataggtcccagtatctattctcttgttttcttttttgagatggagtctcgctctgtcacccaagctggagtgcagtggtgcagtcttaactcattgcaacctctgtctctttgttcaagcgaatcttgtgcctcaacttcccgagtagctgggattacaggtaggcaccaccacgcccatctaatttttgtatttttagtagagacagagttttgccatgttggctaggctggtcttgaactcctgacctcaggtgatccgcctgcctcagcctcccaaagtgctgggattacaggcatgagccatgtacctggactattctcttctttgtgttcacgtgcactcaatgtttagctcccaattattagtaagaacatatggtatttggtttcttgttcctgcattagtttgcttagaataatggcttttagctacacccatgttgctgcgaaggacattatcttgttctttattatggcttcgtaatattccatggtatatatgtaccatattttctttatccagtctaccgttgatgggcgtctaggttgattctatgtctttgtaattgtgaatagtgctgtgatgaatataagtgtggatgtgtccttatggtagaacaatttatatttctttgggtatatacctagtaatgggattggtaggtcaaatggttgttctgttttaaattctttgagaaattgccaagggtctaatatcagaatctataagaaacttaaacaaattaacaagcaaaaaacaaacaaccccattaaaatgtgggcaaaggacacgagcagacacttcaggaaaagacatacatgcggccaacaagcatattaaaaaatgctcaacgtccctaatcattacataaatgcaaattaaaaccacagtgagataccatcttacactagtcagaatggctataattgaaaagtcaaaaaatagcacacactgctgaggttgtggagaaaagggaaaacttatacactgctggtgggaatgtaattagttcagcccctgtggaaagcagtttggtgatttctcaaaggacttaaaacatgatgtgttgaagtacaaatacattgtggaatggcaaaatctagctaattagcatctacatgacgtcaccttgtcatcatttttgtgaggagaacacttgacattcacccttttagtgtcttttgagaatacagtgtatcacggtgaactgttgtcactatgctgtgcagcacatcttttgaagttattcctcctgtctaactggaattttgtgtctattggccaacatctttctaactttccccactccacttcccccagcctccattctacaagaagttaatttctatattgtttgtgaatctggtccccgttaggagatccccttgccatctctgaattccttcccactctcagcctttctctgagggcatctactctacaagtttagggagaaaaatctttcatgcatttggggaatatcaagtgaatttcgacatgttccagatgctgtctagacagtgagtaagtggtgctataaaacagaagtccttgtgttagtttgctgagaatggaacagaaaaccaaacaccacatgttctcacttataagtgggagtcgaacaatgagaacacatggacacagggaggggaacatcacacactggggactgtcgggggtacgggataaggggagggagagtattagaacaaacacctaatgcatgcggggcttaaaacctagatgacaggttgatgggtgcagcaaaccaccatggcacatatgtacctatgtaaccaaactgcacattctgcacatgtatcccagcacttaaagaataatttaaaaaacccctccagaagtccctatgctctaaacacagagaaaatacaagtaaatttgtaaaataccacatgctatgtcagatgatgatagatcctatactatgtcagatgacgacagatcctatactacatcagggcgtgacagctcctacaaagtaaagaaagaaggcaaaaaagaaaacatggatgaggtgttagtttttactttgctttcctgtaagaccagcagacaaggtgacaatggaacagaagacagggtcagagtgaccaccttccctgcagaagtgtgtgccaggcagaaggaaagatcaatgaaagacgctgaggaatgtgcttctggcagatgttcaaggctaacaaggaatccagtgtagcgagagaatgagcaagaagagagggatgggagatggtgtcagaggatgatgaggaatgaggtgacctcctaaatgctgaaatttgataacacaaggagttcctcggtcctgatgttgttgcatttgcactttggtaatttggttgcaaaggtgtcccattatttgaaatgcatctcctctttgtttttcactgttgccttgagttctgtgttttttttttttttttgagatggagtctcactctgtcacccaggctggagtgcagcagtgcgatcttggctcactgcaacctctgcctcctgggctcaagtgattctcctgcctcagccccctgagtagctgggattataggcgcctgctaccacacccggctaatttttgtatttttagtagagatggagtttcgccatgttggtcaggctggtctcaaactcctgacctcaggggatctgcccacctcggcctcccaaagtgctgggattataggcgtaagccaccatgccaggccaacttctggtcttttaattacaagttgccttttggaatatattggtcccaggttctttttctctgaaaattcctctcgccctagaggtgcacacacacacacacacaaacacacacacacacacacacacacacacaatgcatacacatgtgcatcacatcgtggcctcctagggctgtgttactcctctgctcttctcacccctagtctcactattaagaaggaatggaggccaggcacggtggctcacgcctgtaatcccagcactttgggaggctgaggcaggcggaccgcctgaggtcaggagtttgagactagcctgaccaacatggtgacaccctgtctctactaaaaatacaaaaattagctgggcgtggtggtgggcgcctgtaatcccagctactggggaggctgaggcaggaggattgcttgaacctggaaggcggaggctgtggtgagttgagattgcgcccctggactccagcctgggcaacagagcaagactccatctcaaaaaaaaaagacaagtgaaaatggtggtgatatatatgaattttgcttaaaccaagcaataatttaaggcaacaagaaatctctgtcacacgcatcagcctgggaaaaaacttaaggagctaccacattgagtagggttggaacttacaaacagggagagaagggaaactctaattttgctggcataaatgtgaagtgatacacctggatacagctataaatactaaaaatacagatattcattcactcgttttctcaatctcagcactacttaaattctaagccacattattcattgtggtggggtctgtccctgttgtctgctgacctttacagggtgaaagccaaatatgtcattgctcaatgtcccctgggggacaaaatcatgccacccactcaagtgagaacgacaattttaacataaaaattccaaaatgtgggaggccgaagcgagcggatcaggaggttaggagtcaagaccagcctgaccaacacggtgaaaccccatctctactaaaaataccaaaattagcctggcatggtggcatgcacctgtaatcccagctacttcgggaggctgaggcaggagaatcgcttcaacccgggaggcggaggttgcagtaagccgagatcgcaccattgcactccagcctgggtgacaagagcaagactccgtcttaaagaaaaaattccaaaatgtttttgtagcatttataggataggaaaggaaaggagaagacaagctaaaaacaactgcactaaaatatagcatatttgtgatatgcataggattttgtctacgtgtttgtataagtgttgtatgaatacaaaagtgtgcataatatagaaagagaagttttaaaagaaacgaacttatacaacaaggaatgacagttaaaatgcaattaggttaagcacagtggtttcaaaacaactgtctaaagcaacatagaatgaaaatctgaaaaaattttaatataatcacataaaatagtaataatttaataacatcaaaatgggttacaaatttaagattaaactaccagtcatggaaactaaagaatatgacaggaagtcttttaaaattatctgcgtgtggtggttggtgcctgtaatcccagctactcgggaggctgaggcaggagagtcacttgaacccaggaggtggaggttgcagtgatctgagatcgcgtcactgcactccagcctgggtgacagagcgagactccatctcaaaaaaaaaaaaaaaaggaaaaggaagtagtgtctaaggttataatttgatcttatataaagatgtaaggattcaagcatgtttatgacagatataaatgtgacacaacttctagatatggattgaatacaaaaagctaaaaggcacaataaggaatgacagagatgtgaaaagaagttggaaatttatatatagaaggtgatttattcagccaaaagatgcagaagaactttctacatttataaggcaattagggagacacaatgtgaccgatggatggatttggctacacaagctttttaaacttgcacactgtcctctcaaatacattgaaacttacacaaaagaacataaaacagctaagaaaaaagtacatataagaacattccttgtgtaataactcacataaaagaactaaatgacaaatgccaaaattggcaaaaactccaaagcttatatgttaaagaatgtaataaaaaacacgaataaaatcactttgaatccatcatacaaaagccaagaattttcatagataatttccaacagagtgataaatgtctgacaaacacagatgtagtcagtcttaccagtaaggaaaaattgcaaagtaaaggccattaatataccagttttcaactcttaaataaaattttaattcatttgaatacctagcataagaaaagcagctgaaaactgtacgtttcataaactgctgttgccaggtagtagttggaaaaaatttattggtctggatctttctcatcaatatggaaacaaactcaaatatgcccttctatttttatttatttttatttttttgagatggagtctcgctctgtcgcccaggctggagtgcagtggcgcgatctcggctcaatgcaagctccacctcccgggttgacgccatcctcctgcctcagcctcccgagtagctgggactacaagcgcccgccaccacgccaggctaatttgttttttgtatttttagtagatatggggtttcactgtgttagctaggatggtctcgatctcccgaccttgtgatccgcctacctcggcctcccaaagtgctgggactacaggcgtgagccaccacgccggaccaaatatgcccttcttaaaaatgaaaaattggcggggccaggtggctcatgcctgtaatcccagcactttgggaggccgaggtgggtggatcacgaggttaagagattgagaccatcctggccaacatggtgaaaccctgtctctactaaaaataccaaatttagctgggtgtggtggtgagcacctgtaatcccagctacttgggaggctgaggcaggagaattgcttgaatccgggaggcagaggttgcagtgagccaagattgtgccactgcactccagcctgggcgacagagtaagactctgtctaaaaaaaaaaaaatgccctcacttcctttcgtatcccccatagctaataccctacttctctttcccacttaattgcagtgatgcttgggcagatgttctgctttcactggaactactttagaccccacattttctcttctaattgggcttttattacccttacttgattgtcggctatcattctccattgctgagttcaagatgcacttctcttcttagcttcataaatgaagatatgaatcaattcattcaccaagcaaatacccacagcagcgtctccactctgttgcagctaggattggctctttcgagatctcgggtctatgttcacaacttgcaatctccctgatcctttcctacggtacctattggactcaccctgttgggttttctgaaatgaaggtctcaatctagaagtgcaaattcctccctggatggttgatggtggagactgaggctgtgtcccaagacaagacagtaggagaaaggaaagaatcagtacccctgagccagcagatatagactccgaaagaaacaaggatgtcccatccagcccaaggttgcatatgctgagggacacctgcagcggagaaatttacagcttcatatgcctgctcattggagacatttcctcctgttattcaacccctgatcacattcagtccctgtgggacattgctcttcatggaaagaaatttttttcttgcatactcagttcccaagacatcagattaaacatcaggcgaatcgagtcgttattattccttctccatggatttgtctgccttccaaaggtctaacctcccatcacttccctccaaccctgagggaaagtttcctccgaagtttaaactgaggaatctttcttgactaagccccttgagtctccaaagcattgacttgtggtaagaacacaggttaagagccgtcatttaatccttcatttataaaacatttgataattgtaagagatacatttacatcttttcatgcaagttacccttagattagcaccttataagagtgatctcattaattttttaaaaaaagtatttatttatttaaatggacagatataattgtatatatttatggtgtccaacatgatgctttgaagtatatatacattgtggaatggttaaatctagctaattaatatatgcattatctcatgtagctatcatattcgtagtgagattcctttaaatccacctttggcatttttcttttcttcctcttcttttcttcttcttcttcttcttcttcttcttcttcttcttcttcttcttcttcttcttcttcttcttcttcttcttcttcttcttcttctttcttcttctctttttttttttttgagacagagtcttgctctgttgccaggctggggtacagtggcacgatcttggctcactgcaacctccacctccagggttcaagcgattctccttgcttcagtctcccgagtagctgggattacaggcacccaccaccacacccggctaatttttgtatttttagtgaagatggggtttcaccatgttggccaggatggtctcgatctcttgacctcgtgatccggctggcatttttcaagaatacaatatgtcatcattaaatatagtcaccttgctgtacaatagatctcttgaatgtattcctcctaactacaattgtgtatccttggacaaacatctccccactcctcacgctgcaactgccccagcctctggtaaccaccattctactcaataattctgtgagatcgacttgtttcaatttcatatgagtgagatcagatggtatttgtctttctgtgactgtcttatttcacttaacataatgttctccagactcaaccatgttgtctcaaatgacagaatttccttcttgtttatggctgaatagtattctattgtgtgtgtgtgtataatacataacgaaattatataatattttaaaatccattcattcattgatggacacgttgattgatttcacatcttggattcaggatattctggacataattctgcatatgaacactttgttggatctgtagtttgctgataacattgaccacatatctaaactcaacatttttattccacccctcactcctgacccattttatggtttggaggtcacaatttacagctttttatattgtgtatcacttagcaaattaagagttacaattttcatttgatgttctgttaattgcaattgattgcaatccataacttgctatactattccgataaattttataatattagtaacctgtcatatgtatacaagatctacatggggatcaaaatcagttatattacatgtgtactttctaataagcagttattgtacattcttacttttttgatggggctacacacacacagacacagaaacatacaaacatacacagacacacacacacacacagacacataaagtcttgacaaattggaagacctccataggagaatggctcacatacagaaaaatctaaaaagtatcatagggtgactggaagaagaaaagttggttgttttttctgtacatatgaagaagttggttgtttttcctgcacatgtggagacagtcctgtctgccactgaaaagaatgctggcgtttcttcttgtacatcatttcatgcggcccctactgggtaccctggattctctcctgactccaatctcttctcaatcatacactcagggtatctgcaacaaaacttccacctcaatttccccctcttttttcaaatttctatatctcttgtatctacaattctattctctgtctccatgaggtcaacttctttagctccttcatatgaataagaacaagcattattttctttctgtgcctggcttatttcacttaacatagcagcttccagtcccatccatgttgctgcaaatgtcataattttattcttttttatggctgaatagtattcaattgtgtatatgtactgcattttctttatctatttgtgcactgatggacactttggttgattccatatctgaactattgtgaatagtgttgcaataaacatgcaaatgcacgtatctttttgatacactgatttcttttcctatggttatagatccagtagtgggattgctgcatcagatggtagttctattttagttttttgagaaatctccatattattttccataaaggatctactaatttacattctaaccaactgtgtataagagttcccttttctccttatccttcccagcaactgtttttttttctttttaataatatccattctaatttgggtaagacgaaatctcactgtacttttttttttttatcgttgttgttgttggtttttttcttgagatggagtcttgctctgtctcccaagctggagtgccgtgatgtgatctcagctcactgcaactccgcctcctggattcaagcgattctcctgtctcagcctcctgagtagctgggattacaggtacccaccaccatgtccggctaatttttgtattttaatagagacggggttttgcaatgttggtcaggctggtctcgaactcctgacctgaagtgatccacctgcctcagcctcccagtgtgctgggattacaggggtgaacccctgtgcctggcctccaccttatttccaaccctactttggggataactttgggaaagtgggaaaatgacaaaggaaagaaaactgttggatacttgagagcagaaaactttttaaaggaaaatcataaactttataaagcagttggaatcaaagaaatggaaactccaggtagataacagaaggagtaacttctacttccacaatctcattaatgaatcatgatttctatctctgggaattagagctctgaaatcacaggcattaattgaagaagagtccttttattgcttccttctgaagaagcgtttcagagcatcctttaggtctttattcctcagactgtagataaaggggttcagcatgggggtgaccacagtgtacatcactgaggctgttgcacttgagggtgagttgtgggttgcagcagaactaaggtacattcctaggcttgtaccataaaacaaggagacaactgagaggtgagatgcacaggtggaaaatgccttgtacttcccctgagctgatgagattgcacgtatggaggaaactatcttagagtaagagtaaaggattccagtgaggggaccaccgcccagcagcacagttgcacaatatatcatgatgtcattaagaaaggtgtcagaacaggcaatgcagattatctgattaagttcacagaaaaagtgggggattgctatgtctgtatagaagggcagtggcaacaccattaagctttgtaacagagaattcaggacactaagaatccagtctatagaactgagggttcatgatgattgtgtagtacagaggatgacagatggccacaaaccgatcataggccatcacagctaggagaaggctgtccaacactgcaaatagtaggaaaaagcacatctgggtgatgcagcctgcataggtgatgactctgctctgcgtctggatattcaccagcatcttcgggacagtggtagacacaaaactgatatctgcaaaggacaggttggagaggaagaagtacatgggggtgtggaggtgggagtctgagattgtggccaggatgatgagcaggttcccgagcacggtgaccaggtacatggacaggaacagcccaaagaagaagggctgcaattctggttctgctgaaagtcctagaagaagaaattctgaaattcgtgtatcattccctggtttcatcttgttgatgtgactaccaaaaaaagagaaggagaatatgacacaagcatgccttacaatcctaacaatataaatgttgtcatttatattcttcagacaagaagttaatttctttttctaaaatatgtatttataaaattacagataaagttgcatctatttatcatgtacaacataatatgtttaagtataagtacaaagtgaatggccatttgtagctaattaaaatctgcgttatctcacaaaattatcattttcgtggagagaacacttaacatccacttttgccatttttgaaattacaaaatatcttcatgaactatagttaccatgatgtacaatagacctctcgaatgaattccttctcattaactctcattttctattctttgaccaacatcttcccaactttctttgtccccaacctcctcagcttctcataaccttcattttacaagaagttaatttctatattttgtgtgtgaatctgattcctgttggggatccccttgcatctctaatttggagttccttcttactctcagcctttccctgagggcatgtattctatagttttaagaagaaaatttttcatgcactttaataaagtaaattgaattttgacatattccaggaatttagacgatgagtgaatggtgccataaaaccaaggcctcaacaatctaatgatggagaaataatataagtaaacttttaaaataccatatactatgtcagatggtaacaaatcttatgaagaaaaagaaagaagataagaagaaaagcatggatgaggcatcatttttactgggtgttcaggctagaccagcagacaaggtggcaactgagcagagaccataatgaagacccggtatgaatgtgcagaagtgtgtgcaaggtggaaggaaggatcaataaagcatactgagaaatgtgcttctttcagatattcaaggccaacaaggaagccaatgtggcaggagaatgagcaagatgagagggatgagagatggtgtcagaggatgctgagggaggagatggcctgacagctgctgaaactggaaggcacaaggaggccctctgtccagatgtcgatgcatttgccctgtatgaatttggttgcaaaggtatcccatgaagtgaaatgcatcccctcttcattttcttcatttgccttgagttctggagttctggtatctgtctttttttgttgttgttgttggagtcttactctgtcgcccaggctggagtgcagtggcgtgatctcggctcactgcaccctctgcctcctgggttcaagagattctcctgcctcagcctcctgagtagctgggattacaggcatgtgccaccatgcggggctttttttttttttttttttttttagtggaaacagggtttcaccatattggccaggctggtcttgaactcctgaccttgtgattccttcgcgtcagcctcccaaagtgctgtgattacaggcataagccactgtgcctggcccgctccttcttaaaataaaaaagaaatgccctcacttcagtgtatatacctccacaactaatgtcctatttctcttctcgacttaattgcaaagatccctgggcaaatgttctacttttactcttttaattaggcttcccccatttcctcttctaatgggacttccatttccgttactactaattgtcaactattatcctccattgctgagttcaacatccatttctttttagcatcacaaataaatacatcaatcaattaatgactcaagcaagcaaacaaccaaagcaatctctctgctctgggcttggctgtattggctctcaggggacttcaggtctatattcatggctctcattttcccggagcctttcctgtagtacctactgcgcacttggactcaccctgatggattttctggaaggaaggtgtcgtccatgtggatgtatgaattcctccctggatggttgatgatggaaactgaagctctgtcttgagacaagacagcaggagaaggtcaggcatcagtactcgagccagattgaggactccaaaagaaacaagcatgtcccatccagtccaaggtagcatatgctgagggacagtgacagcggagatatttacggatttgtgtatctgctcattaggcacatttccctcttgttattcccaccctcagcacacgatgtccctgtgggacattgctctgcactgaaagaatttttttttttcttgcatactctgttcccaagacattagggtaaacatcaggtcaatccagtcttttttttttttgagacagagttttgctctgtcacccaggctgcagtgcagtggcacgatcttggctcactgtaacctccacctcccgggttcaagcaattctcctgcctcagcctcccaagtagctgggactacaggtgtgcgccaccatgcctggctaatttttatatttttagtagagatggggtttcaccatgttggccaggctggtctcgaactcctgacctcatgtgatccacccgcctcggcctcccaaagtgctgggattacaggtgtgagccaccatacccagcccactccagcctttgttactttttctatatggacttgcttatcttccagagacctgtctgaaacctgaacccaacctggagtgaaagttttctccaaagtctaaactgaggcacttgtgaagaggtcctttggatctctaaagtttagttttctgcttcaatgatctgtctaatgctggcatggggtgtcgctttatgaacatacttgcatgttgccctttttgctttataaatgtagatgtttggctaagttaatctcatgttatacacacatttccaacctgattttatcagttcattcttctttattgtgacttttggctttttgtattagatctctttctggaagttgcatcacatcacctttggctatcatttaaaaatcattcttaggccgggtgtggtggctcatgcctgtaatcccaacactttgggagatgggtggatcacctgaggtcaggagtttgggaccagcctggccaacatggtgaaactctgtctttactaaaaatacaataattagctgggcatggtggcaggtgcctgtaatcccaggtgcctgtaatcctactcgggaggctgaggcaggggaatcgcttgaacccaggagacagaggttgcagtgagccaagatcacgccaatgcattccagcctgggcagcaagagtgaaacttcatctcggaaaaaaaaaaaaaaaaaaaggaaaagaaaaaaatcattcttctttatcatctgactacagctcatcttgatctctcatatagcagtatttgcaacactattatcgtgttgccgtttatgtctcttcctcggtctagaagcagtggctttgtgaagaatctggggcttcgatgttgggtaggtatatatttggatagttaaatctttttatgaattgaacattgaacgttttatcatcatgtaatgcctttcctcatcctcctttttttttttttttttttttgagacagagtctcgctctatcgcccaggctggagtgcagtggtgccatctcggctccctgcaagctccgcctcccgggttcacaccattctcctgcttcagcctgcctagtagctgggactacaggtgcccaccaccacgtccggctaattttttgtatttttggtagagacggggtttcaccatgttagccaagatggtctctatctcctgacctcgtgatccgcccgccttggcctgccaaagtgctgggattacaggcgtgagccaccgcgcctggcccttcgtcctcctttttgactattgttggtttaaattcttttttatctgatacaagaataatgacccctgctctcttttgttttccatttgtgtgataggtcttttcccatcattgattttgagcctatgggtgttattacatggatctcttgaagaaggtgggaagaggggccttgtttttatttttcaatttttaatttttttttgggtacgtagtaagtgtgtatattactacagggtacatgaaatattttgaaactgccatgcaatgcacaattatcacatcatggagaagggggtacccattccttcaagcattcattctttgtgttacaaacaatccaattatagcctttaaagtatttaaaaatgtacaactaaattactactgaccataggtcatcaccctgttgtgctatcaaatagtcttattcatttttttctattttttttgacccattaaccatctccacctttcccatatcactcacttaccttcccagcctctggtaaccatccctttttgtgtgtgtgtgtgtgttttgtttgttttttgtttttgtttttttgagatgtaatctcactctgttgcccaggctggaatgcagtggtgcaatcttgggtcactgcaatctctgcctcctgggttcaagcgattctcgtgcctcagcctccctagtagctggtattacaggtgcgcatcatcatgcctgggtaatttttgtatttttagtggagacagcatttcaccatgttggtcaggctggtctcctgacctcaagtgatccgcccgcctcagtctcccaaagtgctgggattacaggtgtgagctgctgtgcctggccagtaaccatccttctactctctatgaccatgagttcaattgttttgatttttagatgccacaaaaagtgaaaacttgtgatgtttatctttctgtgcctggattattttacttaacacaatgacctccagtttcatctgtgctgttgcaaatgacaggatctctttattttttatggctggatggtactccattgtttgtaagtaccacattttctttattcattcatttgttgatggacactgaggttgcttccaaatcttggctattgtgaatgttgctgcaacaaacatgaggatgcagatgtctctttgatattatgatttcctttcttttgggtatacacccagcagtgggattactggatcatatggtagctcttttttttagtattttgaggagcctccaaactgtcctccatagtagttgtactaatttacattcccacaaacaatgtacgagggttctcttttctccacatcctcaccagcatttgcttacctatccggccaggcatggtggctcccacctgtaattccaacactttgggaggctgagatgggcagatcacccaaggtcaggagttcgagaccagcctggctgacatggcgaaaccctgtctctactaaaaatacaaaaagtagctgggcatggtggcacacacctgtagtcccagctactcgggaggctgaggcaggagaatctcttgaacatggcagtggaggttgcaaccattttgtgctctgtatttaacaaaacaaaaacatctgttgaataaacagagagagatgaatgaaataggcatgagagggtaaaagatctgataggtacaagtggtcaatgagagatcgtgatgcagaaagcttcctcatttctagcagcaccccaagcctggttaaatacctgtgaagccaagaaaaattaataatgaacaaaacatggtctatttagagtgtcaagacaccttacagattgaataccccatgagaaaaatgagtgaagggaataagcccagaattcaccaaagaaaacataaaaaatgcaacaatagtgagttgttttttttaaccagatgcaatggtaacatagttttgtaaaaaataataaatgcaaaacttctgaaatcagaagaaaacaggtttggaatgtcagagctaccttgaatcagctgtctgaacttggagaatcaacaagaccattcaaaatgttaatatgtttttctaaatagtgagatagcagcatctatcctcctgagatgggagatgtaatcaatctgtgtaaggtgctttacattgttccttcctgttagtgaatgaatagttatcaccagtgatgaagtgaggctgatatttttccttctggctctcaaaagtctcccttttttctctatcacccggttacccaattcaatggtcctgttttagttcctcatgatttcttccaggcttctgaggctggcatctctatatacccatattctcattgatccagaaaaatctatatttcacagctgatcacctaacactctggcttaaatgcccaccctgtgattccccatgggagaaagaagctgaaattctacagcttcaaacacaaggcttgactctgataccttcacactgccctaccccaacccacatcaatcttccataagttgaccaagttgaccttgactttcagcttcaccagaagccagagcttcaatgctcaatgtcttcatacatttatctccttctgcttgaacttgttccataaaatagcagaagaagactaatattaaaaaaataagtctttgtgttctcacatatacctgggatataaaaaattaaaactcatagaagtatagagtagaatggacattaccagaggataggggtgaggacagggtcgatacaaaaaggaaaatgttagtcaaaggctataaagtttcagctggacaggaggaataatttctagtgctccattgcacaacatggtgactattgttgagaataatgtactatatatttcaaaattgctaaaatattaaattttaaatgttctttccacaaacaaatgatagatatgtgaggtgatggataggttaattagctccacttaatcattcaacagtgtatacatatatcataacatcacgttgtacctcataaatatatacagttactattggtccatcaaaaattaaatttaaaactaaattttaaaagatctcatcaaaaaagacaaaaaggtagctataaggaaaaagggttataaaataaggtggaaatacatatgatttacttctactaaagatgcagaagaattttctaagttaagaaaaattggagagtgtgggttcatgataggaccaactgagagatttgacaaagtttataaaacaaagtttataaactttcttttcttcatcctgtatatatatatatatatatatatttttttttttttttacacaatcccttgatgtacatctatacatacataaaaaattaactattattcagcaaacttggtgaaaaatctctaattcttcatttgaatgaatgcaatcaaaagaataaaaacactcacactctagaacataaaagcaaagaacctgcaaaatctgcaatagagaaagtaaatggctaacaaaccaacaaatgctgtatactcagcctcagcagaaaggaaataattgcaattaaaaactcttgagtaatcctaatttgacctatgaaataatattttttcaagtgattatgaaaaataatccagagatgtttctcaacatcctacaactaacgggacagcccacactacagaaagttaagcagtaaaaatgttaacactagagaggttgaaaggctattctgtccagaatatgtccaacttcaatgtgtgtatgattcaattagggatcttgttcaaatgtagattctcatatggggcctctaggataggtccagacattctacatgtgtaatggtttccccgttgatgttgatgctccctgacctgttgggtggttcactctttgaggatcaaggctatggtccagtgttagagtcaattagtacttcgagatcttctccagcaagaatcctaccacacacctcatatttgacttcaggtggtcagtgttggactgggcaggtcagcttttgcataaataaagattgcatgtgcctcttgtgtgcttctctcatgaaagaaaatgaaacctttagaaattccatctactggctgggcgctgtggctcacgtctgtaatctcagcactttggaaggctgaggtgggtggatcacaaggtcaggagtttaagaccagcctggccaatatggtgaaacccagtctctattaaaaatacaaaaattagctgggcgtggtggcacgtgcctgtagtcccagctacctgggaggctgaggcaggagaatcacttgagctcaggaggcagaggttgcagtgagccaagatcgtgccactgcactccagcctgggtgacacagtgagactctgtctcaaaaaaaaattccatctacttatggagtttatgtgagaagtaagcaatattttgaagctcattggagattaccttgcacagagcagatgctcaatggatatgtcagctcttcttgactatgtctttagttcatcaaattactccttcaattcttgtaggaagtcttataagaactcctttaattcttcatagaacacttactttattgcaagtttatagcacatcattcattaacatttaatgtggacataagtatgaaattcttgcaagtctgtttctcatgccagtaaatttaatttttacttatttattaactcccctattgtctttgggaatattgtgtttctccacctttggctcggggctttgctaatacctcaattgggaggcatgtatatccctacagtggttgatgtggagcatagatatgtgatgtgctttgtctgaaagaatgtgcgcattcatgagaagtccaatgtctatgaagaagttgtaagaggccttgtgagtttccaccacttctcttgatcttcctctgtcaaactgtccttcctattcaaaattcaaaaactaactagatttggatagtcgcatggatggaatattttgtcctcttcaaaatccctatgtcctaatcccaatgaaaaactttcccaacataaactcctatgtgataaaaaagcaggacattaaaccgttgactaatgggatggcttattatgcagcagtagcttactgatacaataaacagtgcaaacagatctaaagacattcaaaatattctaatgcttcttagtttttaacattggttcttatatttgaggcagcattaatgattacctggatattgatgcttatgtcagataattgtattaaaacgagagtattgtttcctttttttctaggcagccaggaaagcttgcaaggacatatatgtttttgaaggaatgaattgtgaccttggttcacacaagtttctattcccagaggcaataataggcagaaatccaagttcatgtgtgtgtattcctttgatcgtgagagttgaagagagttcagagtataaaatatataaagcaactgctgataaatgaagcacacatattgttcacttatctgcactttaatgtttatgacacaatttttaaaggggaagatatttgttagtacaatggaaggagtcgtatttataggtagcactggaaaattttaagtaaaatgaggaagctaatacaataaaattatatggactatgacaccaaatctctcagatgcacaaacttcattacacatggacactaagcttgtatgcttcaaatgttccacagtaattccatatgtgactgaaagttttattctgtcatattgaaggtaattgctgagtcttaaggccagatgaagtcaatttatgtatgctcacttgtctttctgtttagtttacacttggaacatgtattttataagcaatttttaatcccagcactttgggaggccgaggtgggtgggtcacgaggtcaggagatcgagaccatcctggctaacacagtgaaacctcgtctgtactaaaaatacaaaaaattagccgggcgtagtggcgggcgcctgtagtcccagctactcgggaggctgaggcaggagaatgacgtgaacccgggaggtggagcttgcagtgagccaagatcacgccactgcactccagcctgggagacagagcgagactctgtctcaaaaatcaatcaaccaatcaataaaataaaaaaataaaaaataagcaatttttgtcctccttctttttaccagggaatatagagggcactgtagacaccaagcagaatagaagacaggatcctaaggaagagaataaaattccaggagtagctataaaacacactagtatattaaaatttacattgtgaggaggaccagttaaggcagtgacagagaaagaaataacaaatggaaaaatgaaaacctgtggtctcagctaggcatccacagtaaaattatattaatgaccttagagtggccattcttaattatttgggctaacacaactcattactgcatgagacggataggaatctccaccttgtttctgaccctagtctgggaataactttgcaaaagttggaaaatgacaaaggacaaaaaaactgttggctgtttgagagctgaaagcttttaaagaaaaggcatacattttacaaagcagttaagatcatacaaatcccaaaaaattaacagaaggaaccacttctgttttcacaatctgactaataaatcacaatgtttgggtctggggcttacagctctggaatcacagacccttcttgaaaaatggctcttttaaaaaaatttttttttttttaaattttgagacagagtctcactctgtctcccaggctggagtgcagtggcatgatctcagctcactgcaaccttgcctcatgggttcaagcgattctcctgcctcaacctcctgagtggctgggactacaggcgcatgccactacgcccagctaatttttgtatttttagtagagatgggggtttcaccatgttggccaggctggtcttgaactcctgacctcatgatctgcccacctctgcctcccaaagtgctgggattacaggcttgagccactgtgcccagccgaaaaatggctcttttattgtttccctctgaagaattgtgtcagagccccctttatgtctttattcctcagactgtaaatgaaggggttgagcatgggggtgaccacagtgtacatcaccgaggcgacagcagttgagtgtaagttttgggtcatagtagagctaaggtacacccctagccccgtaccataaaatatggagacaactgagaggtgagatgcacaggtggaaagtgccttgtacttcccctgagttgacgagattgcacgtatggaggaaactatcctacagtaagaataaaggatcccaacgagaggaccaccgtccagcagcacagctgcaaaatgcatcaccatgttgttcacaaaggtgtcagaacaggcaaggtggatcatctcattaagttcacagaaaaagtgagggatttccaagtctgtgcagaaggacaactgcaatgtcactaagctttgtaacatggagtttaggacactcatgatccaggacaccagaaccagcagtccacagagctgagggctcatgatgaccgtgtagtgcagggggtgacagatggccacaaactggtcataggccatcacggtcaggagtaagctgtccaacactataaagagtacaaaaaagcacatctgggtgatgcaacctgcataggtaatgactttgctctgtgtctggatgttcaccaacatctttgggaccatggtggaggcaaaacagatatctacgaaggacaggttggagagaaagaagtacatgggggtgtggaggcaggagtctgagattgcggccaggatgatgagcaggttcccgagcacagtgaccaggtacatggacaggaacagcccaaagaggaagggctgcaattcttgtttctctgaaaatcctagaagaagaaattctgaaatttgtgtctcattccctgctttcacctggttgatgtttctaccaaaaacaaacaaacaaacaaaaaaacacacaagaaagaacagaacatgagaaaaacatgcattacaaacttaccagaaatgctgtcatacatattctacagtgaagaagctacgttttattttattttttatttttatttttttgagttagagttttaatctttatgcccaggctggggtgcaatggcgtgatgctggctcactgcaacctccgcctcccaggttcaagcgattctcctatctcagcctcccaagtagctaggattacaggcgcacgccaccatgcctggctaatttttgtatttttagtcaagactgggtttcaccatgttggccaggaaggtctcaaactcctgaccttaggtgattcacccgcctcggcatcccaaactgctgggattacaagcatgggaagaagtagtatctaaggttatggtttcatattatataatgatataaggattccaatatttatgagaaaggtggtctttagtcagatgataaataatgatcaccaaatgatggtcaaaggtaatgcaacttctaagaagagatctaatacaaaaagccaaaaagcacaataaaaaataagagagaaaacaagttggaaatgcatgcataaaaggcaatttatttgtccaaatgttgcagaagaactttctacatttatgtagcaaggaggggagcacactatgatcaatggatttggctacacaatacttctaagctttcacacatttccctcaaatacattgaaagttacataacagtaataaaagacatatgccaaaattgatgaagaactccaagtcttatattttgataaatgaaataaaacaggattaaaaatattacaaacccattttacaaaaggaaagttcatgtacagtttgcaatagctgtaaatgtctaacaaatacacagatatatttagcttcactagtaaaaaaaagtggcaaagtttgttagtatttcactttttcacccattaaataagtttttgatttcatttgaatacttagcatgagagaagatactacaaaatgtatacctcatgactgctgttgtcaggtagtttttgaaaggaattcattggtctggatctttctcaccaatatggaaagacagtcaaatatgccccttcttaaaaacaaacaaacgaacagacaaacaaatccctctcttcagtgtatatctctccacaggtaattgacagagcaggagcaccatcatcttggacaaccgccactttaagttccagctccttttctaacctcatgcatcttaagaaaatcacttctcttctaacaacaagcagccagaaagagcagacagtaaaacacagataagacagctcgggcatagagggagggggaaagtctcttgggtaaccaccaaacctggcactcacacagtgggccccagaaaaacagtgggctctaataagcacattcctttccctttaggtgcactaagatagggaagctaaaagcagacttggggggtatgcctgcagctgcaagaagatgtacgggaacagacacaaaaactctctctccaggtaagcaagacaaagaggcacagaaacattccaagccggtgataagctctcccgccttgaacccttaaaaactcttagtctgtaagagagtgccttggctggcacagtggcttacatctgtaatcccagcactttgggaggctgaggcaagcagatcatgaggtcaggagtttgagaccagcctggtcaacatagtgaaaccctgtctctactaaaaatacaaaaaattagctgggcgtggtggcaggcacctgtagtcccagctacttgggaggtggaggcaggagaatcacttgaacttgggaggcagaggttgcagtgagctgagattgcaccactgcacttcagcccgggcaacagtgtgagactccgtctcaaaaaaaaaaaaaaaaaaaaagaaagagagtacctctgacctaactcagccagaagcccctctcaggtttgttctccaaaataaacctgtcttcaaccgttgagctgcttttcatgtttctttaactattacagtagtaccctatttttcatcttcacttaattgtaaagatccttgggcacggatgctacttttactggagccactttaatcatctcatttcctcttctaattgggcttctattactattacttcattgtcaacaatcatcctccaatgctgaattcaatgttcatgtctctttttagtatcctaagtaaatacctgaatcaattaattagtcaggcaagttagcaaacaaccacaacaatctctccactctagcactggttggtttggctctcaggtagccttaggttcacgttcacagctcccattctccctgaccctttcccgcagtacctactggactctttgacttaccttgactggttttctgaaagaaaagcctccatgtggaagtgtgaattcctccctgaatggttgttggtggagatggaagctctgtcccgagacaagacagtaggagaaaggaaagcatcggtgcccaagccagcagatttagactccaaaaaacacaagcatgtcccatccagcccaaggttgcatatgctaagtgacaacagccaagggggtacttacagatttgcacattaggtgcatttcctcttgttattccaaccctgagcagatcattttcctttgggattttaccctgctctgaattgattttttccctgtattctctattcccaagacaccatattaagcctgcagtgaatccagtctttattattccttctccatggacttgtttgccttccagagttctaacctcctaatgccttactctattcctcattcccgagggaaggttttctcctaagtctaaactaaggaacttgtcttaactatgttccttgcatctccaaggtattcacttgtgatgggaacacagcccttgatatctccagaattatcgctattttcctctttaacaagggggtgaactctgttctgatataaaaccgtgagtcctacatttcttgaaatcatgatgcttttgccaaaacaatgagaaattttgtacttcttaaaaaggttaagagctgtcatttaattcttcatgtataaaacatctggttactcttaagagatatatttggctcttttcatgcaagttgccctgagaatagcaccttctaaagattatttaatttaatttttcaaaatttatttatttaaattgacagataaaattgtatttatcacaaaaaacatcacattttgaggtatatatacattacagaatggttaggtctagctaatggatatatgttttacctcacatagttatcatttttgtagtgaaaacacttaacatccactctcttaacattttccagaaacaccatatatcatccttaaatataaaatcttcatgctatactatagatctgctgaacgtattttttctggctgcaattttgtatcctttgacaaacatttccccactcctcctcccacaacagctgtagcctctggtagccactgttctactctataattctatgagatcaacttttttatattccatatgattaagatcatgtgatatttgtgtttctgtgcctagaatatttcacttaacataatgctctctaggttctttcattttgttgcaaatcacagtatttccttcttacacagggctgtatagtattccattatgtacatatgccacattttaatatccattcatccactaaggtacacttagattgacttcatatcttggctattgtgacactgcaataaacaggaaagtgcagatatctgtttaatacactattgtcatttccattggataaatacctagtgggatccctgagtcgcattctatttttaactttttgaggaacgtacatactgttttccataatggctatactaatttacattccatgaacaatgtataagatttcccctttctccatatcgttgtcagcatttgttatttttcctgtcttttgataatagccctgttagctgggatgacgtggtatctcattgtggattcaatttgcatttccctgataattcgtgactttgagcacttttcatggaccattgtatacttgtatgtcttcttttgaaaaaagtgtcctcaggtcgttgcctatttattaatcagattattttttcccactattgagttttaaaatacattctagataaccatttttcagatgtttagtttggaaatattgtctctcattgtacagcttttctcttggatctgtcaattatctcctttgctgtgcagaagattttttagtttgatgtcatcccattcatctatttttacttttgtaatctatgcttttgaagttttattttgaaaaatctttaccttggctaattttatgaagcttatcccatgtattttcttctagtagtttcatagtttttggtattccatttaaatatttatttcatttaaagttaatttttgtatatagcaagaaaaggaatctagtttcctttttctgaatgtggatatccagttttcccagtagcattcattaaaaagactgtcctttcaccaatatgtgttcttggcacttttgtctaaaatcagttggctgtaaatatgtgtttatttatgggttttcgtctctgttcctttggcccatgtgtatgtttttatgccagcacgaagctggtttaggtacaatagcttcataatatagtttgaagtcagatagtgtgatgtctccagctttgttcttttggttcaacattgttttagccatgtagggtcttggatggttccatatgtattatacaattttttttgtatttctgtgaagaatgtcattggtattttgacagggattgcactgtgtcttttgatcactttgggtattatgggcattttgataatattgttatttagttatttatttactttttgagacaaagtctcactctgttgccagactgaaggccagtggcacgatccccactcactgcaacctccacctcccaggttcaagtgattcttgtgcctcagcctcctgagtagctgggacacaggcatccgccaccttgcctggatagtttttgtatttttagtagagatggggttttgccacgtttgccaggctggtctcaaactcctgacctcaggtgatctgcctgccttgccctccccaaatcctgggattataggcatgagccaccgcacctggccaattttgacaatattaatcaggaatacatgttctaccttcagtccttggcagagagcatgtattctaaagttttaatgagaaaatctttcatgcatttgaggaatataaagtggattttggcatattccaggcactgtccagaaaatgaatgtgtgatgttataaaacaaaagaagaaagaggtaagaaggagaatgtggatggagtgttattttttattgggtggtcaggtaagaccagtagacaaggtgacaactgaacagagaccacaatgaagacagggtggagtcaccatgttccttgcagaagcgtatgcaaggcagaaggaacgacaatgaaagaccctgaggcgtgttcttctttcagatgttcaagtccaacaagtaagccagtgtggcaggcaaacaagcaagaggagaggaatgagagatggtttcagaggatattgaggaaggagttggcctggaagctgctgaaacctgaagacacaaggagtccttctgtccagatgttgcatttgcactttattaatttggttgcaaaggcgccccatgaattgcaatgaacttcctctttgtttcctgctgtggccttgagttctgatgttcatatgatgagttatcttttggaatacatagcccaggttctctttgtctgaaacttctcaccctaaagaaacacacacacacacatacacacggaacacatatacacatctgacgttcatattttgtgttgtcatttggaatatgtaactcaggatctctttgtctgaaacttcttctcactctgaagcatcatacacacacacacacacataaacacacacacacacatagacacatacacacatatatacggaacacacatacacatctgctgtggcttcctgggtgcatgttactcccatgcccttctcaacaccaattacagcattagaaaggaaatggataccaggtaagatttgaataatgaaaatctaaaacaaacttatgaaagaaaagatatgaaataaattactgacgtgagtcagaaattcaaaattaaagtggcaaacatctgcaaataaatgctcaaccattgtggaagacagtgtggcaattcctcagagatctaaagacagaaatatccttcaacccagcaatcccattcctgggtatatacccataggaatataaatcattctattataaagacacatgcacacgtatagtcattgcaacactattcaaaatagcaaagacatggagtcaacctagatgcccatgaatgatagactggataaagaaaatgtggtacatatataccatggaatactatgcagccataaaaaagaacaagatcatgtcctttgcagcaacatggttggagttagaggccattatccttagcaaactaacacaggaacagaaaatcaaataccagatgttctcacttacaagtgggagctaaatcatgagaacacacggacacagagaagggaaaaacacactggggccaactggagggtggagggtgggaggagggagatcaggaaagataactaatgggtactaggcttaatacctgggtgatgaaataatctgtacaataaacccccatgacacgtgtttacctatgtaacaaaactgcacatgtacccctgaacttaaaagtaaaaaaattaaaatacgctttttttagcagtagaagaaacagtatttaaagccataatttcattcctatctaagtataaatggatccaaatatgcttacgaaaaagatcttaagttgaatgtaattttagtttgtattcaattgtaggttgtgagtgcaaaagagtatcttccacaagatggcagtagattactgctttaaaatatagatctgcatattctcatttatatgcagaatctaaataatcaaactcatagggatagagaggagtaaggcagtggttaccagggactggagtatggggtggggtggatgcagaaagcggagacattagataaaggatataaagttagcaagaatgggttctagtaatctattgcacagcatgatgactttagttgagaataatgtattatatatttccaaagtgctagtatcatagattttaaatgttctcaaccacaaagacatgataagtgtatgaagtgaccgatacattaattaggttcctttaatcattctacaatgaatacatataaaataacatcttatcctgtgttagtttgctgagaatgatggtttccagcttcatccatgtccctgcaaaggacatgaactcatccttttttatggctgcatagtattctatggtgtataggtgccacatttactttatccagtctaccattgacgggcatttgggttggttccaagtctttgctatcgtgaacagtgctgcaataaacatacgtgtgcatgtgtctttatagtagaatgatttataatcctttgggtatatacccagtaatgggattgctagaaaaccaaacactgcatgttctcactcacaagtgggagttgaacaatgagaacacacggacacaaggaggggaacatcacacaccggggcctgtcggtgggtggagggctagcggagggatagcctaatgcagatgatgacggcttgatgggtgcagcaaaccaccatggcacgtgtatacctatgtaacaaacctacgtgttctgcacatgtatcccagaacttgaagtataataaaaaataaaaatagaaataaaaataaaataacatcttactgcaccccacaagaatgcaatgatttttgtcaatcaaaacagaaattaaaacattaaattaaaaataaaaatagatctaattacaaaaggaagcaataagcaaaaacagatgtgaaataagatggaaatacttatgaaggatgatatatttctagcaatgatgcagaagaattttctaagtcaaaaaacaattggagaggtgggaacaaattatgacaaacagatttgagcacacaacgcttataaactttcacacattttcctgatatacacctctacatacataaaaattaaacattattcagcaaagttggtgaaaaagctacaatttcttgtttgaaagaatgcagtcaaaagaatgaaaacattcagacgtcagaacatgaaagcagggaacttgcataatttgcaatagagaaaataaaaagcaaacaaatccagcctcaccagaagaagaaaataattgcaagcaaaaactctttagtattctcattttgacctattgtataacatttatttttcatgtgaatatccaacatgaaagaagagactatgaaatgtatgtcttgtgaactgctgttgcaagatggaatttacaagtaatccattggtgtggatctttgcagttaagcacagaaacatgctcaaatacgcctctcttaaaatttgttccaaagtctctcaattcattgcacatcattccacaccaaatattctactatcctgcttctttcactgcaaaatttctagtatgtgttgtaatttactggaaccactttttgtcttccattccttcttcaatctcatccaaatcaacttcctttattatcacttagttgtcagcaatgatccctgcattgcttagtatgacaaacacttctctttttaacatattaactatattaaatataaattagtcaaccaggcaaacaaacacacatcaatctctcagcttgacttaggctagtttggctttcaggtaacactaggtaaatattcttgacttatattgcctctgaacattttctgcagtacctactgggcggactcacctgtatggggtctcagagaggaaggtctccatatggaagtctgagctcctccctggatgctgataatggagaatgaagctctgtccccagacaagacagtaagaagaagtgaaacatcagcaccttagccagacatatgtctacaaaccattcacatcacatccagtccgaagctgttacagtcttaaggacaatagcagatgaaatagatttttacaattccctgtatctatgcatcagacaaatttcccttttttcactccaatccatgagcacctaatcttttttcatctgttgacttttaaaaaagttatttaaatagttttttggggaacaggtattgtttggttacatgaataagttctttagtgatttcttttttttttttgagacagagtctcgctctgtcgcccaggctggagtgcagtggcgcgatctcagctctctgcaagctccacctcccgggttcacgccattcttccgcctcagcctccttagtagccgggactacaggcgcccaccaccacgctcggctaattttttgtatttttagtagagacggggtttcaccctgttagccaggatggtctcgatctcctgacctcgtgatctgcccgcctcggcctccaaaagtgcagggattacaggcatgagccaccgcgcccggcctttagtggtgatttctgagattttggtgcactcatcacctgagcagtgtacgctgtaccccatggatagtcttttattccccatccccctcccaccctttccccaagtccccaaaatccattgtatcattcttatgcctctgcatcctcgtagcttagctcccactcatgagtgagaacctatgatgtttggttttccattcctgagttacttcacttaaaataatggtcttcaatttccatccagattgctacgaatgccatcaattcatccttttcatggctgagtagtgtcccacggtgtgtgtgtgtatataacaatttctttagccactcattgtttggtgggcatttaggttggttccatatttttgcaattatgagttgcatgagcacctgatttttcgttggacacaggtctggaaaagaagaaacatttttctgctgattctgttccaaagagatcaggctagaagtcaggtgaatccagacttcattacttctctgtgaaatctcccacctgacgatggtctagcctccttagcacttttgctgaaacttgagttaaaattgtctccaaagattaagacgaagaatatgtcttcaccagggcccttggaaactcaacgtattgacttctggtaagaacatagttttattgacatctccagaaaattgcaattccctctccaacaatggagataatgtgttcatttgctataaaaccattgatagttagtataatccttggcttcctgatgctatcgacaaaacaattaggagtttcatgcttgtatacacaagaaagtgttgtcatttaatccttaatttatgaaacatttggctattgcaagagatataattacacattttatgcaccatggactgaagttggaatcttacatggtttgtctcatttaatgtcacatgtaatgtgtctcatttttgcacattcccatgctacgaggagcctctttctacatttgtagaattggggctaagaagggttaagtgatctgcccagtgttatgaactgagggaaggatgagctttgattggaactccatcaagatgtttctagttcttggctgcaggcggtggctcatcccagcactttgggaggccgaggtgggtggatcacgaggtcaggagctcgagaccagcctggccaatatggtgaaaccccatctctaataaaaatacaaaaaattagttgggcgtggtggcaggtgcctgtagtcccagctactcgggaggctgaggcaggagaatcgcttgaacccaggaggcagaggttgcagtgagccaagatcacaccactgcactccagcctgggtgacagagcgagacttggtctcaaaacaaaacaaaacaaaacaatacaatacaaaacaaaacaaaaaaaacggtttccagttctcacagtctcggtcagtggttctcaaccagggatgattgtccttccatgagacacttggaaatgtctggatacattttttgttgttgtcacctagggaggtgctactggaacctagtggattaaagccagggattgctgttcaacatctcacaatgcacagaacagtctacaccagaagtatccataaacatgttaaccttggagaggttgagagaatgttttggaaaagaatatactcaaattgaaagtttttataattcatttgggaccttgttcaaatgcagattctgatttgggacattgagggtaggcagaaacgttgtgcatttgtggctgtttccctgttgatggtgatgctgttcattctgttctgtgaagcactctttgaggatccagtgttagagtcaaagaaaactacttttaaacctttttcaccaagaatcgtaccacatacctcatgtctgcctttaggaggtcaaatgtttccctcagtggctcagcttctgcagaaacaagtttatacaagcctcttgagtacttccctcacagtaggataaaaaacttttagaaattccacccaccttgtagaatttatgtgagaagtaagtaacagttttttaaaattttactttaagttctgggatacatgtgcagaacatgcagatttgttacacataggtatacatgtgccatggtggtttgcagcacctatcaacccgtcatctaggttttaagccccgcatgcattaagtatttgtcctaatgctccccctcccctttcctccccaaccctgccaacagtccccagtgtatgatgttcccctccctgtgtccatgtgttcttactgttcaactcctacctatgagtgagaacatgtggtgtctggttttctgttcctgtgttagtttgctgaggatgatggtttccagtttcaggacataggcatggtccaagacttcatgactgaaacaacaaaagcaatggtaacaaaagccaaaatggacaaataggatctaattaaactaaagagcttctgcacagcaaaagaaactatcatcagattgaacaggcaacctacagaacaggagaacatttttgcaatctatccacctgacaaaggtctaatatccagagtctacaaggaacttaaacaaatttgcaagaaaaaaacaaataactccatcaaaaagtgggggaaggatatgaacagcaataacagtttaaagctcactggaaattccttggcacagaggagctgttcaatggagagcagctatagtgactaggttccaactccccatttcctaggctcatggtgacaccagaatggtgtttggggacaggaagtgagtctagcattgccctgctcctgggaggcagcaagttgtgatcatgaaggaggacttctacctaaggccctgtatagggagaagagaacttgagaggccatcattctatactttgttgaattcagggacatcatctgtgttactcttatgttccctccaaatagtcatattaaggaatttttagactctttcaagctgttctactatcttcttctcttaggaatatctataaagctgatgtttcttggtggatcatattaatcctctagctcttctgggaactcctccaagtcttcatagaaatcttatcttacttgttgaaagtctatagaatgtaattcataaacacttaatgttaacagaagtgcacaatatttgcatgtctgtttcacccccagatagataatttttattttttacttatttattgagtcctctattgtctttatgacaattgtcattctccatccttggctctgggtcttgatgatacctcatttgggaagaatctatgtccctgaaatggttgacattgagcttgaacataagactgctttttctatcaggatttgagcagtcatgagatgttcagtattaagaagaaataagagttattgtgagatcccaccacttctactgatcttcctctccattcaccatgtccaaaattgaaaaaacgaactagatttggatggtcctgtggactcaatgtttttgtctcctccagtattcatatgtattaatccttattataaaatcttctttagtatagctccctatgtggaaataaaagcatgtcattaaacctttttctattagtataccttgttatgcagcagtagcttaatgatacaatcaatgcaagcagaacaaaagaattcagaataatttaatgcctcttatttttggacatttgttctgatatttaaaggcagcattcatgtttatttcagataactgtataaaaaatgagactacctattagattcccttctagggagctagaatattttgaaagaacgtgtatgtatttgtagatataaattgtgattctgattcacaagtctctattctccaagccaatgctggttagaaattcaggttcctttgtgagtcatcatttgattataagggttgaagagagttagagtataaaagagacaaatgaactgatgataagttaaatacacacattgttcacttacctacattttaatggctaagacacaatattttaaaaggaagattttaagcaggacaacagaaggagtcttatttgtgtgtagcactgtaaatttttaagcagaaacagtaaaatgatataatgaaattacatagactgtgattccaaatccttcccttggactaacaaacctcattacaaatgggcaccaagcctctataagtagatgtatatcatcagatcaaatctcccaatgcaattcaatgtatgactgatttttttttttgagatggagtctctgtcacccaggctggagtgcagtggtgtgatctcagctcactgcaacctccacctcccaggttcaagtgattctcctgcctcagcctcctgagtagctgggattacaggcatgtgccaccatgcccggctaatttttgcatttttagtagagacagggtttcaccatgttggccagcctggtcttgaactcctgacttcaggtaatccacttgcctcagcctcccaaagttctgggattacaggcgtgagccaccatgccgggccaaaaattttactccatctttttttcttttatatttttgtgggtacatagtagatgtatatacttatggggtacatgagatgttttgatacaggcatgcgttatataataatcacatcatggtgaatggggtacccaccccattaagcatttattctttcagttatgaataaattttttaatccatattctttcaggtgtttttgtaatctaagtccagatgaaatcaattgattcacacaaatttatttttctgtgcagactacacttgaagtgtgaatttgataggcaatttttttttttttgagatggagtttcgctcttgttgcccagactggagggcaatgctgtgatctcggctcactgcaacctccgtctcccgggttcaaaccattctcctgcctcagtctcctgcgtagctgggattacaggcatgcgccaccacgcccagctaattttgtatttttggtagagacggggtttctccctgttggtcagcctggtctccaactccctacctcaggtgatccgcccgccttggcctcccaaagtgctgggattacaggcctgagccaccgtgcctgcacttgataggaaatttttaccttcttactctttccagggaattgagcaggcacggtggacactgaactgaatagaggacaggaccctaatgagtaggataaaatgccatgatgacagcactttggggggccgaggcaggcggatcccctgagggtaggagttcgagaccagcctggccaacatggtgaaaccccttccctactaaaaatacaaaaattagccgggcatggtggtacatgcctgtaatcccagctccttgggaggctgaggcaggagaattgcttgaacccaggaggcagaggttgcagtgagctgagatgatgccactgcacttcagcctgggtgacagagcgagactccatctaaaaaaataaatgccatgatgagctaaaatgcacactcgtgtggggtaaagtttacatgaccaggaagaacacttaaggtggtggtggagaaaggaataagctcaaagtgaaaaactgtcttctcagatatttatctaaaataaaattatattaatgaccttatggctgccaggtgcaattgattctgcaggactaatgcaacccacaagtgtaggagaaaaataggaatctccaccttgtttctgaccctagtttgggaaaaacattgggaaagtaggaaaatgacaaaaaaaaaaaaaaaaaaaagattggatatcagagagcggaaagctttataaaggaatacattaaattctatgtcagttgagatcaaagaaattgaaactctgagaaaaaatagaaggagcaaattccactttcacaacctgattcgtgaatcacaatttctgagtatgagacttaaagctctgaaatcacagttatttcttgaaaaatggcccttttattgctttcctctgaaggacattttcagagccctctttatgtctttattcctcagactgtagataaaggggttcagcatgggggtggccacagtgtacatcactgaggctgttgcacttgtgtgtgagttgtgggttgcagcagaagtaaggtacacacctaggcccgtacaacaaaataaagagacaactgagaggtgtgatgcacaggtggaaaatgccttgtacttcccctgagctgatgagattgcacgtatggaggaaactatcttagagtaagagcaaaggatccccacaaggggaccaccagccagcagccctgctgcaaaatacatccccatgtcattaagaaaggtgtcagaacaggcaaggtggatgacctgattaagttcacagaaaaagtgggggatttccaagtctgtgcagaaggacagccacaataccattaagctttgtgacaaggaattcagggcagcaatcatccaggatgccagaaccaggagtccacagagccgagggttcatgatgactgtgtagtgcagaggatgacagatggccacaaaccgatcataggccatcacagccaggagtaagctgtctaaccctccaaaaagtacaaaaaagcacatctgggtgatgcagcctgcataggtgatgactctgctctgtgtctggatgttaatgagcatctttgggattgtagtggagatgaaacagatgtctgcaaaggacaggttggagaggaagaagtacatgggggtgtggaggtgggagtctgagattgtggccaggatgatgagcagattcccgagcacagtgaccaggtacatggacagaaacagcccaaagaggaagggctgcaattctggttcctcagaaagtcccagaagaacaaattctgaaatccctgtgtcattctctggttccatctttttttttctatttatttatttatttatttatttatttatttatttattaacatagacagggtctctcactctgttgccaacgctggtctgaacctcctggactcatgcgatcctcccacttcagcctacaaaagtgctgagattataggcataagccattgtgcccaggcttggttgcatcttttcaatgtgactaccaaaaagagagagaatatgacaatgtaattatgcattacaaacctatcagaaattctctcatttatactccggagtcaagaacttatttttcctttaaaaattatttatttctatggtgacagataaaatggtatgcatttatcatgtataacatcacatgtggaagtatatttacattgtggattggctaaatctagccaattaacattagtattacctcatatagtcatcattcttgtggcgagaacacttaacatccattttcttggcattttccaataattcaatatatcatcatgaactatattcaccatgctgtaaaataaatattttgaagttattccttctatctaattatcatcttgtatcccttgactgacatcacctcaagcctccataccaattgccctggcctctagtaatctccattctacaagaagctgttttctatgttttgtgtgtaaatctggtccctgttagaagatctccttgccatctctgattaggaattcctagaccacgctctctcgctctctctctctctctctctcagcctttccctgagggcatgtattctacagtatcattaaagagaaaaatcattcatgcatttgtggaataaaaaatgagttgatgttcagggtactgtatagataatgagtcaatggtgctataaaacagagtccctacaatcaaataacgggaacaaatacatatatactatgtcagttggtgattagtcctatgaataaaaaggataaaaagtgttacttttaataggtgtacagacaagatcagcagacaagctaaaaactgaacagagagcagaatgaagacagggcgagagtcatcatgtcccttgctggagtctgtgcaaggggaaggaaggctcagtggaagacttcacagaatgtgcttctttcagatgttcaaggtgctcaaggaagccagtgtgtcaggggaatgtacaggaagagagtgatgagagatggtttcagaagatgttgtgggatgaggtggccttgaagctgctgaaacttaaagacacaaggagtccgtctgaccagatgctgttgcatttgcattttattaatttgcctgcgaaggcatctcagtatgtgtaatgcatcccctctttttttcccgccgtgtctttgacttctggcttttctattatgagataccttttggaatacagagcccaaatcccctttctctgcaacctgcttttatgctaaaggtgcgtgcgcgcacgcacacacacacacattgcctacatgcacgcagcacactgtagctccctggagccatgttactcttgtgcttttctcaccctggttacactgttagaaagaaacgaataccaggcaagttgtcaatttcaaattatctttccccacgagaattcagaaatggtctgatagcatgtgagacagccttctcatttctcttctttaattattcatgtggcatctcttctttaattattcagggtctttgggatttgaactctttttgacagtcctatggaattgcactagttctggttctggtcttcctgtaacatgcaatgtccttcctagaccatactattgaatcctggctgggcaccgtggctcacgcctctaattccagcactttgggaggctgaggtgggtagatcaattgtggtcaggagttcgagaccagcctggcctatgtggcgaagccccgtctgtactaaaaatacaaaaattagccaggtgtggaggcaggtggctgtaatcccagctactcggggggctgaggtaggagaatcgcttgaacctgggaggcggaggttgcagtgagctgagattgtgccattgcactccagcctgggcaacaagagcgaaactctgtctcaaaaaaagaaaaaaaaaaagaaaaaaatcctgcacacactatgataactgtctccttttctgcagaatgaaattctccatatgatttcatccttgaggacattgtgtcatagacacatttgttacattttactttgtcttctctgttataatgcatgagtcaaatgagcaggaacttccctgctttaagtttgtattttcacaaaggtgtatgagtatgtctgtattatgtagaaaaaaattaaagcaatgagacgtgataaaataaaaagaatgttatgggattaaagccagggtaaatgtagtgatttccaaacaactatattttttaaatgttatggtacataaaacgttaaccaagccaagataaacaataagaataatttaatgatatcaaatgatttagtttattggcaaagacctagacataaaattatataatacacaatgtttctaaaatgttctggcacatagaagatactctcgacttattgaataagtcaggaagtaagtcctagtatatatgggtattaaaatatgacaagattgcaatccaatttagttgcaaaagaccagattgttgaataaaagcagaaataaatagctatctacctgggagaaaatgaagtgtgtctcccgactcacattttacaaagaattagcagatttaaagacctcagtgtaaaagtcagcaatatatgttagacgaatacatagataactacatataagatcttagtgtagacaaagtattttaactaacgcaagaaaaaaaactaagaaagtagacatatttttaggtaaataaaagttaaaactttttatgaccaaaaatgtttccttaaatatttcattaacagtcaatgaggagggcaatataattggatcacagctgtaatcccagtgctttgggaggctgagtagggaggtcacctgaagccaggattttgagaacagccggggcatcatagtgagaaccaggctctaaaaagtaaaccaaaaaagttaacgatcccaaagaaatacaaactcccatcagagaatactataaacacctctatgcaaataagctagaaaatctagaagaaatggataaattcctggacacatacaccctctcaagactaaaccaggaagaagtcaaatccctaaatagaccaataacaagttctgaaattgaggcagtaattaatagcctaccaaccaaaaagaggcccaggaccagtcagtttcacagctgaattctgccggaggtacagagaggacctggtatcactccttctgaaacgatttcaaacaatggaaaaagagggactcctccccagctcaatttatgaggccagcatcatcctgataccaaaacctggcagagacacaacaaaaaaagagaaaatttcaggccaatatccctgatgaacatcaatgtgaaaatcctcagtaaaatactggcaaactgaatccagcagcacatcaaaaagcttatccagcatcatcaagtcggcttcatccctgggatgccaggctggttcaacatatgcaaatcaataaatgtaatccatcacataaatagaaccaatgacaaaaactacatgattatctcaatagatgcagaaaagtcctccgataaaattcaactccccttcatgctaaaaactctcagtaaactaggtattgatggaacataactcaaaataatcagagctatttatgacatacccacagccaatatcatactgaataggcaaaagctggaagcattccctttgaaaactggcacaagacaagtgtgccctctctcaccactcctattcaacatagtgttggaagttctggccagggcaatcaggcaagagaaggaagtaaagggtattcaaatacaaagagaggaagtcaaattgtctctgtttgcagatgacatgattgtatatttaggaaaccccatcgtctcagcccaaaatctccttaagctgataagcaacttcagcaaaatctcaggatacaaaatcaatgtgcaaaaatcacaagcattcctatacagcaataatagacagagagccaaatcatgagtgaactcccattcacaattgctacaaagagaataaaatacctaggaatataacctacaagggatgtgaaggacttcttcaaggagaactacaaaccacagctcaaggaaataagagaggacacaaacaaatggaaaaacattccatgctcatggaaaggaagaatcaatatcttgaaaatggccatactgcccaaagtaatttatagattcaatgctatccccatcaagctaacattgactttctttacagagttacaaaaactactttaaatttcatatagaaccaaaaaatagcccgtatagccaagacatttctaagcaaaaggaacaaagctggaggaaatgattggctctcaggtgacctcaggttaatattcacggctcttgttcttcctgacctttcctacagtacccactgggctctgggacttaccctactgagttttctgaaaggaaggtctccatggagaagtgtaaattcctctctagcaggttgatggtggagatggaatctctgtctcaagacaaggcatcaggaaaagttgaagcatcatctatacttgagccagactaaggactccaaatgaaaccaccatgtcatttccagcccaaggttgcatatgctgagggactgcagcagaggagatatttatggcttcgtatatctgctgattagatacctttcctcctgttattccaactctgaacacatcagtttcctgggggacgttgccctgcactgaaacaaatgtcattgttgttttttttttctgtatcgtctattcccaagacactatgttaaaagtgaggtgtatccaggctttattactccttccccgtggacttccttggcttccagagtcccattctcctagcaccttctcccagccttcagtgaaaatttcctccaaagtctaaactgaggaacctgtcttgactaggtcccttgagtctccaaagcactggcttgtgatggaaactcagctcttgacatatccagaaaatggcaatttacctttgcaaggagatgaactgtgttctgttcatataaaaccatgggtactacatttcttggcttcatgttgcttttgccaaaacattagaatttcatatatatatttttttgagatggagtcttgttgtatcacctgagctggagtgcaaaaacattagccgggtgtggtggcagttgcctgtaatcccagctatgcaggaggctgaggcaggagaattgcttgaacccgggaggtggaggttgcagtgagccaatatggcgccatttctctccagcctgggtaataagaacaaaactccatctcactaaaaaaaaaaaaaaaagtgttagaacaggcaagcaggatcaactgattaagttcacagaaaaaaatggggggatttccaagtttgtgcagaaggacagctgcaacacattctgctttgcagtgaggaattcagggcactcatgctccaggacaccagaacccacagtccaaagatcccaggattcatgatgaccctgtagtgcagggggtgacagatggccacaaagtggtcataggccatcacagtctgcagaaatacattcatccctgcaaagagtaggaaaagtttgtgattctggaaaagtttcttgggaaaggacatgccttgcttctcggagacagaaatttgtgatcatgaagggacacctgcttccaggggtccacacggggaggagattgcatgagtgtccttccacgtctgctttattatactcagggacatcttctctgtcctcctctgcctggctccaaaaattcacattaaaaatgtttagactccttttattttattttatgttctggggtacatatgcaggatgtgcaggtttgctacataggtaaacgtgtgccatggtggtttgctgcacctatcaatccatcacctaggtattaagccccacaggcattagctagttttcctaaggttctccctcccccccaccccaccccccaacagggctcagtgtgtgttgttcccctccttatgtctatatgttctcattgatcaggtcccacttataagtgagtgcatgtggtatttgattttctgtttctgcgttagtttgctgagggtaatggcttccagcttcatccacgttcctgcaaaagacatgaacttgttcctttttatggctgcatagtatttcatggggtatatgtaccacattttctttatccagtctatcactggtgggcatttgggttgattctatgtctttgacatgaacagacacttctcaaaagaagacattcctgtggccaacaaacatatgaaaaaaagctcaatatcattgatcattatagaaatgcaaatcaaaaccacaatgagataccatctcatgccagtcagaatggcaatgattaaaaagtcaagaaacagatgctggcaaggttgcagagaaataagaatgtttttacactgttagtgggaatgcaaattagttcaaccagtgtggaagacagtgtagtgattcctcaaagatctagaaccagaaataccatttgatccagcaatgccactactgggtaaatatccaaaggaatagaaatcattctattaccaagatacatgcatgagtatgttcatttttagactcttataacctgctctgctatcttttaatcttgggaatatctgtaattctgataattcttgttgcgtcaatttatttctccagctcttctggaaactccaactattaatagaaatcttatcttcctcattgccagagtatagcatgtggtaaaaatacaaaaatagacatggagaaaactgtagataaaatttatacacatttaatttcaacagaagtatgaaagactttcatgtctgtagggaccagccctacagggtctgtgggtttttctcctcgtgtgtggagacaatagattgtagaaataaagagacaagacaaagagaagaaaagacagctgggcctgggggaacactaccaccaagatgcggagactggtagtggtcccgaatgcctggctgcactgttttttattggatacaaggcaaaaagggcagggtaaggagtgtgagtcatctccagtgattgataaggtcacatgagtcacgtgtccaccggacagagggcccttccctgtttggcagtcagggcagagagagagagagagagagagagccattatttcttctatgcatttcaaagacttttagtattttcactaattctgttattgctatctagaaggcagagccaggtgtacagggtggaacatgaaagtgaaacacgggcatgaccgctgaagcacagcatcacagggagacaggcctccggatggctgccggcgggcctgactgatgtcaggccttccacaagaggtggtggagcagagtcttctctaactcccccggggaaagggagactccctctcccggtctgctaagtaatgggtgccttccctagacactgatgctaccgctaggccaaggagccctctagtggccctatctgggcgtgacagagggctcacactcttgtcttctggtcacttctcaccatgccccttcagctcctatctctgtatggcctggtttttcctaggttataattgtagagcaaagattattataatattggaataaagagtaatgtacaaactaatgattaatgatattcatatataatgatatctataatctacttctagtataactattcttattttatatattttctttattatattggaacagcttgtgccctcggtctcttgccttggcacctgggtggctagcagcccacacatgtctgtttctccctcaggtagatcattttatttttcattcatttattacctcccctattgtctataggtggatggtgcttttccacctttggctctgggtcttgacaataattcacttgggaggagtgtgtatccctaaaacggttgatgcacatcttgaacatgtgacatgatttgtctaacagactgtgagcagtcatgacatatttaatgcctgtgaagaaactgtaagaggcactgtgagattccaccacttctcttaatcttcctctctcaaagtgtccttgctatccaaaattcaagaaccaactagatttgggcagtcctatgaactgaatatttttatttccttaaaaaacgcttaagttctaattcccaatgtaaaaacttctctatcataaactcctacaggatgaaaaagcatgatattaaaccatttattattgagatggcttgttacacagcagtagcttactgatacattaatcaatgcaaacagaactagtgacattcagaataatcttctgcctcttcttttttcacagttgttctgatatttcaagaaaacatttgtgatcacctggttactcgtgtttatttcagataactgtattaaagtgaggcaacttttagattgccttcgggataaccaggagaagttgaaaggacatataggtttttgcagggataaattgtgactctaattcacaagtgtctattgacagaggcaatattgggcagaaattcaatgtcttgtgtgagtcattatttgaccatgaggaccaaagagactattaaaggaacaaagcaaattatgataaatttaatacacatattgttcacttacctacactttaatgcttatgagacagtttttaaaggaggagatatttttagaataatgcaaggagtcatattcgtagggagcagtagaaaattttaagaggaaaagcaagatggtacattgaaataatacagaccatgacaccaaatccttcactcagatgaagaaacctgattacacatggacaccaaatctccacacttccaggaccagatgtacatcatcaaaaacaaatattctatagtcattcagtgcatgactgatcattttattccatcacatttaacatcatctgtgactaaggatgtatgaggtcaactgacacataaaaatgtgcctttctttgtaaactgtatctaaaacatgtatttgataagctgtattttcctacctactctttatctttatcagaaaatataggcactgttgacgttgagctgaaatagagcataggaccccagtgaggcgagtaaaatcccttgcctagctgtaaaacacactagtattgaaaggagttagttagcttgccttaggtagatagcaagataaggattcctggagagcctttgactcatgggtcagtgcctcatctccatataatataaaaaaaaagcctggggaaaaaaaatgaagctgccggcaccaataagggaagaagcataggggattgtgtctggagacatgcccacggctgcacagataggaaaactcctggctcatttagataaaaactttcacaaacctctggctcactcagataagaaacaaggcctggcatagaaatgcctttgtcctttgtatagtcagtggcctcccaggaaaaagctttttctcccttcgtgggcatggacgcagtgggctctggtgggttccggtgggcactctacttcccttgttttggactataagtctggtctctatgaattcagcccctgattgatcctgggcaaaggtcctgggccaagctttctgaaaggtcccaggccaagatcctgagccaagctgagtcagcgttctccaagacagcctgcagactaaacacattgcttcccctttccagtccataaaaacctcagaacgggcctcatagggggcttcccattcaggaccccctctctgctggccgagagctttcttcttttccctccaacctcatctttgtgtccacgctccttaatgttcttggaggtaggacgaagaactctgggttttatctcaggcgagagactgttacatgttggtgcattgctaagacctcagcagtatgttcaagttgacattttcaggaagaacagctaaggttttcatagaaaaggaaataacagactcagaaatagaaaactgtgggctcagatattcatctaccataaaattatattaatgaccttacagttgccaagcgtagttaattctttgggatgaatataactcacccctgtatgagaaaaacttccatttgtttctggacctagtttggatgtaattttagaaaaatgacagaggacaaaaacagttgcatatcagagcagaaagctttattaagaaaaagtgtaaattttctaatgtcgtcaaggttaaagaaatctaaagtccagaatataaatactaggagaaaattctactttcacaatctgatccatgaatcataatttctggctaggggatttagagctctgaaatctcaagaacttctggaaaatggccctcctgtttctgctctctgaagaatcgattcagagctctgtttatgtctttattcctcaggctgtagatgaaggggttcagcatggaggtgaccacagtgtacatcaccgaggctgcagcatttgagagtgagttatgggttgcagcagaactaaggtacacacctacgcctgtacaataaaataaggagacaactgagaggtgagatgcacaggtggaaagtgctttattcatcccctgagctgatgagatcgaacatatgcaacaaagtatcttaaagtaagtaaaatattccagcgaggcatcccccacccagcagcacacttgtaaaattcatcatcatgtcattaataaaagtgtcggaacaggcaaggtggatgacctgattaagttcacagaaaaaatgagggattttcaattctgtacagaaggacagctgcaatgccattatgctttgtaacagagaatataggatgctcacgatccaggacaccagaaccagcagtccacagagccaggagttcataatgactgtgtagtgcagggggtgacagatggccacaaaccggtcataggccatcacagtcaggagtaagctgtccaacactacaaagagtataaaaaagcacatctgggtgatgcagtctgcataggtgatgactctgctctgtgtctggatgttcaccagcatctttgggacagtggtagacacaaaacagatgtctgcaaaggacaggttggagaggaagaagtacatgggggtgtggaggtgggagtctgagattgtggccaggatgatgagcaggttcccgagcacggtgaccaggtacatggacagaaatagcccaaagaggaagggctgcaattctggttcctctgaaagtcccaggagaaggaattgtgaaatttgtgtctcattccctggtttcatcttgttgatgtgacttccaaaagagagagaaagagaacatgacacaagcatgcattacaaacatatcagaaatattctcacttatattctacagtcaagaagttaatatgggctggctgcagtggctcacgcctgtaatctcatcactcgcggaggccaaggtggacggatcacctgaagtcaggagttcgagaccagcctggccaacatggcaaaaaccggtctcagctaaaaatacaaaaaaaattagccgggcgtgctggcgcatgcctgtaatcccagctacttgggaggctaaggcatgagaatcacttgaacccaggaggtggagattgtagtgagccgagatcatgccactgcactccagcctgggcaacagagtgagaccctgtctttaaaaaataataataaaataaaataataaataaataaataacttcctacaatttaatgatgaatgaaaaatacaagtatgtttttaaaatgccatcctcaatatcagatggtgatgcatcctatgaagaaggaggttagaaggaaagagtggatggggtaatagattttccagggtgttcaggcaggaccagcagagaaggtgacaaatgaagagagcccataatgaagacagggtggagggcactacgttccctgcagaagtttgtgcaatggagcaaaatgatcaatgaaagaccccgaggaatgtgcttctttcagatatttgaggactgcgaagaagacagtgtggccggggaatgagcaagaggcgagggctgtcggaggatgttagggaaggaagtgtcctcatagctgctgaaatttgaagacacaaagagtccctctgtccagatactgatgcctttaatttggctgcaaaggtgtttcatgaactgcaatgcatgctcattctgtttactgatattttcctgagatgtggcctttatctgatgggttaccttttgaaatatagagatcaggttccctatctctgaaacctgtgctcactctaaagttgtgcacccacacacgtgcacacacacacagagaacgcacccacacaggcagccatggcttcctggggccatgttaccccctcacgcttctcatcccactcacagtattagaaaggaatggataccaggcaagctgttaatatcaaattatctttccccaagaagatacagatatggtacctagaatttccagtttgaaaacttctcatgcatatggaacctcgagcgccactgcactccagcctgcgtgacaaagcgagactctgtctcaaaaacaaacaaacaaacaaaaaaccgagaggcagagagagaaaatcgattggaactgaagggaaaaataatctaataagctcacatagtccctcagagaccttaaggaagaaaaggcttccttagttttgaaaacattccaactcctcttatatccctgaggcccagcaaaaatcagaaaagacaaagggaaatttaccaaatatcaaacatggtgatatcttttctgtgtcaagatactgatagattgagaatccccatggaaaaaaaaatgagcaaatgataaaaatcaactattcaaaaaggaaatacaaaaggaacttctgggccagcttatttattgtgctggggtctgtcctgtgcattgtacgatgtttatcagcttccctgttctctactgaccctccccagggtgacagccaacccagtcattgctcaatgtcccctgggagacaaaaccacccctgggtaagaaccgatttttaacataaaaatcacaaaatatttccataccttttatcaactgagaaaggacaagggaagatgagccttaaaacaaacaaacaaacaaaaaaacctatagtcaaatataaaaagcacatgtgttatgcataacatactactcaacctttgtataaacctttgtgtaaagagaaggtttatgaggaactaaaatcttatggagaatagaatataagtgaggatgctattaggttaagaacagttatttcattttatggctgcatagtattccatggtgtatgtcctttgcagggacatcaataaagccagaaaccattatcctcagcaaactaacataggaacagaaaaccaaccaccacacattctcacttatcagtgggagctgaacaatgagaatgcatggacacatggaggggaacaacacacactgaggtctgctggcggggggggtggtgggagggagagcattaggaaaaatacctaatgtatgctgagcttgatacctaggtgatgggttcataggtgcagcaaaccatcatggcatacgtttactacctaacaaacctgcacatcctgcacatgtaccccagaactaaaaattaaaattaaaaaagaatagttatttcaaaacagctgcatgaatcaacatagaaagaaagtctgaaaaatccttatagaaaaatatgacagtaataatttactgacataaagatgcaccactaattcactgtgaaatcgcctcttggaaattgaagaatatcacaggaaaatgtttaaaatgtggggaggaaacagtatctaaggttataatttcgtattatataaacatataaagcttcaaatgtttaggggagatagatgtgaggtttaatcagatgataagcagccagattaggactccaaaaggaaagcatgtcccatcaagcccaaggtagcatgtgctgaggaacagtagcaggggagaaatttacagctttgtgtacctgctcatcaggcaaacttcctcctgttactccagccttgagcacatcgtgtccctatgagacattgctctgcgtggaacttttttatttttcttgcattttctgtatccaaggcaccagattaaaagagaggtgaatccagttttattacttcttcactatggacctgcttgccttccagaaatgtaatctgttaacactgtatcccaaccctgggggaaggtttttctccacagtctaaactgaggagcctgtctttgattagatcccttggatctgcagagcattgactgtgatgggaacacagacattgatatctccagagaatgactcttcccctcttcagcaagggagtgaactgtgttctcttgatagaaaaccatgagttctgtattgcttggcttcatgattcctttggcaaaataatgtaattttgcatacttccttaaccatacatctttacctacacaaaaaaattaaatgttattcagtaaagttagcaggaaaaaaaatcttccaatccattgtttgaaagaatgcaatcaacataatagtataaaaaacctcagaaaccagaatataaaagcatagaacgtgcacaatttgcaatggagaaaatgaaagctactaaaccctcaggtagagtatactcagactcaacagaaagcgaggcttaaaacttagatgacaggttgatacgtgcagcaaaccaccatggcacatgtatacctctgtaacaaacctgcatgttcagcacatgtatcccagaacttaaagtaaaataaataaatacataaataagaaagtctttgcgatagtttgctgagaatgatggtttccagcttcatccatgtccctacaaaggacatgaactcatcattttttatggctgcatagtattccatggtgtgtatgtgccacattttcttaatccagtctatcattgttggacatttggcttggttccaagtctttgctattgtgaatagtgccacaataaacatacatgtgcacatgtctttatagcagcatgatttataatcctttgggtatatacccagtaatgggatggctgggtcaaatggtatttctagttctagatccctaaggaatcgccacaccgacttccactattgcaaggacaaaaacccaaacacctcatgttctcactcataggtgggaactgaacaatgagaacacatggacacaggaaggggaacatcacacaccggggactgttgttgggtgggggtggggggcggggagagcattaggagatatacctaatgctaaatgacgagttaatgggtgcagcacaccaacatggcacatgtatacatatgtaacaaacctacacgttgtgcacatgtaccctaaaacttaaagtataataataaaaaaaaagcagaaaaaaaagaaagtcatggcaagtaaaaactctttagtgttcccattttgacgataaaataacatttattttattcaggtgaatatttagcaagagagagaagatactgtgaaatgtctgtcttgtgaactactgttgcaaggtagtatttgtaagcagcccgttggtctagatctttctaatgaatacagaaacatgctccaatacactcatcttaattttaaaaataaaccctcaattcattgcacatccacccacacctaatattctacattctactctcctacttctttttttgtgtgtttgtttgtttttgagacagagtttctctgttgtgcccacggcatgatctcagctaactgcaacctccacctcctgggttcaagcgattctcctgcctcagcctttcaagtagctgggactacaggtgtgtgtcaccacacccagccaattttgtatttttagtagaagatggggtttcaccatgttggtcagattggtctcgaactcctgacctcaggtgatccgcctgcctcgacctcccaaactgctgggattacaggtgtgggtcaccgtgcctggcccctttcctacttctttaactgcaaacctcctaggttctaacttcactggaaccactttatgtcttccattccttcttcaatctcatccaattgaacctccatatccctcaattaattgtcaacaacaatccctgcattgctgagtcttacagacacattttaacatataaaataaataaattataaattagtcaaccaggcaaacaaacacacatgaatctctcacctggcttgatactaggtgacctcaggtaaacattcttggcttccattctctttgaacatttcctgcagtactttctggggtctcagacgcacctgtatggggtctcagagatgaaggtctctgtgtggaagttgaaattcctccctgggtagttgatgatgcagactgaagctctgtctccagacagacagaagggaagagttaagcatcagccacacagccagacttaggactacaaaagaatcaaccacatcccatccagcccagggttgtctaatcccagagacaatagcagatgaaatatttacagctcctaatatctgctagcgagatatatttccctgttgctactctaagcctggagcacctgatttccctgtggaacactgatgtggaaagaaagaacaatttcctgctgattctctgttcccaagagaatcaagttagaagtcatgtgaatccagtcttcattactccttctctttgaactctgtaccttccagaggtctaagtgccattgcaccttttcacagccctcaattaaaatgttatccaaagtgtaaggctgagtacatggtctttactagatcccttggatattcaaatcattgacttgtggttggaacacagctgccgacatctccagaccaacgctctttcctcatcaaaagggagagaactgtgtttatttgtcataaagccacgggtatttactacagtccttggcttcctgatgcttttgacaaagcaatgagcagtttcttgcttgtaaacacacaagcatcaaagtacaacttatcattcagtccttcctttataaaacatttggtaatcataagagatatacttaaacctttgtagacatcatggaataagttaaaatcttatatggtttgtctcatttaatatcacatgtaatgtgtctcatttttatacatctttgttctatgaggtccaacgattagacgcctctttctgcacttttaggattttggttaaggtgagttagtgacctgcccaaagttatgaaccaagtaagggaagggatttgatcagaatgccatccaaatgtttccagttgtcacatctaggttactgacttttcttttctttacttttttcttttctattttctttcttttttttttttttttgagacagagtttcactcttgtcacccaggctggagtgcaatggtgcgatctctgctcactgaaatctctgcctcctgggttaaagtagttttcctgcctcagcctccagggtagctaggattacaggcatgtgccaccatgcctgggtaatttttgtatttttagaagagacagggtttcaccatgttgggtagactggtctccaactcctgacctcaaatgatccacccacctcagcctcccaaagcgctaggactacaggcatgagccaccgtaccgggccaggttgctgattttcaaccaggggtgtttgtgctccaggaatattaggaaatgtttggatacacttttggttgtcacatgtggggaagtgctacttactggcacattgtagattgaagccggggaagctgcccaacaacctacaatgcacaggacagcccacagcagaaagaattaatgcaaacaaatgtggacactggggaggctgagactattccagtccagaacttccctaatttcactgtatatatgaatcacctagggttcttgttcaaatgtcgattctaatttcagacatctaggactggtcccaacattttatacttttgacagttttcctgttggtgttgatgctattcatcctgttctgcggaacactctttggggatcgaggctgtggtcagtgttaaaggcaggtatacatattttgaggctttttctaccaagaatcctaccctgctcctcatgtctggtttaggaggtcaaatgttggactcggtagctcagcttttgcataatcgagtttacttacgcgtaagtcttgaacacttacggaatgacaggaaatgaaacttctagaagttccacttaccttatgaagtttaggtgagaaggagtaagacttcaaagcccattggaagttacttggcgcagagcaggtgttcaatggatagcagatatttggaccatgtcctagtttcccagttactctgctcattgtgacaccagaaaggtttcttgctacagtctagcactgtcctgctttgaggagacagcaagttgtgatcatgaagggagacctccttccagggccctgcacaaggaggagagtgcctgagagtctatcattctatgctttgttgacataaaatcattcatcattgtctctgtcaccctcatgctggctccaaatactcacagtagatatgtctgactctttaactatcttctacttttgagaatatctgtaaagctgatgtttcttagtgtatcaaattatccacctaatcttctaggagctcctccaactcttcatggaaatcttatcttcctggcttctaggtgatagcatgtaattcatacatatttaatgtatactgaagtataaaatgcttgcatgtctgtttttctcccagtagataattattttccacttatttattaactcttagataattagacacctctttctgtatttttgtgttgcctttctatgttgcctttaggaggatcagtcttctccacctttggctctggattttgatgatgcctcaactgggagaagtgtaacacctacgatgattgagacattctttgtctgataggatgtgagtggtcatgagatgttcaatctgtgagaagaagctgtaagaggcattgtgagatgacaccacttctgttgctcttcctctttcaaattgtccttgctctattatttaaaagtccaataataacaaatgctggtgagagtctggagaaaaggaaatacttccacactgcttttgggaatgtagattagttcagccattgtggaaagcagtttcacagttctcaaagaccttaaaacaggattaccacttcactcagaaattctattattggatatatacccaaaggaatgtaaatcattctactataaagacatatgcatacatatgttcatcacagcactattcacaatagcaaagacatggaatcaacctgaatgtccatcaatagtagaccgaataaagaagatgtggtactatacaacatagaatactacagagtcatcaaaaagaatgagactgtgtcctttgcaacaacgtggttggagctggaggccataattcttagcaaactaacgtaggaacagaaaaccaaataccacatattctcatttacaagtgggagctaaataatgagaacacatggacacaaagaggggaacaacagatactggggcctccttgagtgttgagggtggtaggagggttaggataaaaaaaactatgtatcaggtatgcttattaagcgggtgacaaaatactctgtacaccaaaccctcacaacaaacagttggcttatatagcaaacctgcacatgtacccctgaacctaaaataaaagttaaaaaaagattgtccttactgcccaacattcaagagctaattaagcttggatagtcctatggctgaatatttttgtcttgtccaggatatatatgtcctaatccccaatgagaaaacttccacaatgtagactctgatgtgattttttaaaagcatgactttaaatcatttattattgggatgttttgttacacaacattagattactgatacaataatcaaagcaacataactaaagatattcagaattatctttttttaggtgtcagatccttttgttttttagttttttattggattcactgtatacagaatattctgttggctctttttttttggtgctttttctgatatcagaaagcagtgttcataattatatggatatttatatttacttcacataactgtatcataggatgactacttttagatttcctctaggtaaccagaagagtttggcaggacatgtatatttttgctgaaacaaattgcaacctggaatctcaagtctctaatctcacatgcaatactgggaagaaattcaagctcttatgtgagtcatcattagagagtttggagtataaaagagataaagcaagtgatgatacagtaaatacacatatccttcacttacctccagtttaatgcttgtgacataatttattaaagggagtgatagttttagaacaatgcaagaagtcatatttgtagcactggaaacttttaatcagaaacagaaagatgatgcaatcaaataatgtagatcatgacaccaaatcctttacctaaatgaacaaacctcattacccatggacaacaagcttccaccctttaatgagttgtattagtccgttttcacactgctgataaagacatacccaagactgggtaatttataaagaaaaagaagtttaatggactcacagttccacgtggctggggaggcctcacaatcacagcagaaggccaaaggcatgtcttgcatggcggcgggcaagagagcatatgcaggggaactcccctttataaaaccatcagatctcatgagacttattcactgccatgtgaacagcatgggaaagacctgccccaatgattcaattacctcccaccgggtccctcccatgacacaaggaaattatgggagctacaatcaaggtgagatttgggtggagacacagacaaaccatatcacacaccatcaaaaacaaatcttccacgataatcactgcatgactgaaaattttagtccatcatatttaaggtcgtctctgaatctgaggccatatgaagtcaattgattcatgcaaatgtgtctttctgtgtagactacactaggaacatgtatgttataagtaatattcgccttcctcctctttaccagggaatatagtaggcagtgtagacactgagctggatagcagacaggatcctaatgaggagaataaaatgccatgatgattataaacacaccagcatggtcaagtttacataatcaggaagaacagtaaaggtagtaagaaatgaaggactcagaagtaaaaaactgtgatctcagatattcatctataatatgattataccaatgaccttacatttgccaagtgcaattgattttttaggactgatacaactctctagtgtattagacaaataggaatctccaaaagtgttttaccctagtttggaaataactatgggaaattaggaaaatgacaaacaaaaagtaagttggatatcagagcagaaagctttctaaagaaatagcataagtctgacacagcacttgagaacaaggaaattaaaactctagaaactgaatagaagcagaacattctctttccctccttccatgatctgattcgtgaatcacaatgtttgagttcggttagagctttgaaatcacatgtacttcttgaaagatgctcattttatttcttccttctgaagaattgttttagagccccctttatgtctttattcctcagactgtagatgaaggggttcagcatgggggtgaccacagtgtacatcagaggctgttgcacttgagagtgagttgtgggttgcagcagcactaaggtacaccccaaggctcatacaataaaataaggagacaactgagaggtgcgatgcacaggtggaaaatgccttgtacttcccctgagctgatgagattgcacgtatggaggaaactgtcttaaagtaagagtacaggatcccagtgaaacatcccctacctagaagcacagctgacaaatacatcaccatgtcattaagaaaggtgtcagaacaggcactgcggattatctgattaagttcacagaaaaagtgggggattttcaagtctgtacaaaagagcagtggcaacaccattaagctttctatcaaggaattcagggcactcatgatccaggacgccagaaccagcagtccacagagccgagggttcacgatgaccgtgtagtgcagggggtgacagatggccacaaactggtcataggccatcacggtcaagagtaagctgtccaacactataaagagtacaaaaaagtacatctgggtgatgcaacctgcataggtgatgactttactctgtgtccggatgtttgacagtgtctttgggactgtggtggaggtaacacagatgtctacaaaggacaggttagagaggaagaagtacatgggggtgtggaggtgggaaccagagcagatggccaggatgatgagcaggtttccaaacacagttgtcagatacatggagaggaagagtccaaacataacgggctgcaattctggttcctctgaaagtcccagaagaagaaatcctaaaatcctcgtaccattctctggttccatgtggttgaggtgactaccagtcagagaaagagaacatgaccaatttttactcaaaagggcatcactcacattgttgaaagacaaccagttatattttgcagccaagacattaatttctatattttgtgtatggaacttttcccagtttctgtgctcctcagagctgtctctgattgaaaattcttgtgctattctcaacctttccctaagaggttgtatattctttaatgagaaattcttctacgcacttgtgtaatattgattgtatgctgaccatgttccaggaactgtctaggtaatgagtgtagggtgcagagaaactgataaccttactatccaatgatggagaaagacaatgagctgataaagacatcatcatctgttgcgttagatggtgcttagaagaaaatgaaagcacattaaagagaatggagaggggttgctattttttatgagtgtacaggcaagaccagcagacaaggtgacatttgaacagagacctcaaggaagaggcggttgggagcccagaggatatttggcgaagtctgtgcctgacagagggaatgactaatgcaaaggcctgaggaaggtgcttgtttcggaaaatcaaggctcaaatagaagccagcgtgttgagggcaatgagaaggagggagagtgatcagagatggtgtcaggagtattgaggaaccaggtggtctccctgctgctgttgaaacttcaagacactgacagcctcgtctccccatgtggttctgagccctctattaatgtggccccctaaggacgtaaacagggcagcaaattccagcccaaaagcttcccatgcacatgtaaatgtggggctccattttatatcatcactttgtgcctggtatttaacaaaatacatgagaatttgctgaataaacaaagagatgcatgaaataggcatgatgtacacaggtggttgatgagagactgtgacgaaaacagcttcctcgtttctggcaatgttcaatcctggttatagaccccgatgcccagaataattcataattaataaaagtgatatctttatagggtcaagacatcttacagattgaagaccccaagagaaaatgaagaaagggaataaacccacacttcacaaaaggaatcacacaaagtccaacaaaagcggggggcggttaaagatgcaattgtgaaagacatgtgtaaattgtagtaaatgcaaagcaatgtatgtaaaaaacttggcatgtctcatttttgttcttaaatgaatggttatcactggtgatgagatgagactgatgttgctcttccacctctcatttacctgttttgtaatgtgaaacatctatcatcacaaaaaaaagtttggagttttgcatctactctgtacctgctgttggaccttgaaaagcctataaagtcattctaaatttttaaaaattttttataaatacataatagttgcacatatttatggggtacatgtgatactttgatataagcatacaacgcataatgatcaaatatgggtaactggcatacctgccctctcaaacatttatcatttctttgtattggaaacactcgtatcttctcttctagctatttggaaatatataataaattattaagtatagtcattctattgtgctgtggaacagtagatcttattcctttcatctaactgtagaacttattcctttcatcatcaaaaagcatacacatagaccaatggaacagaagagtaaacccagaaataaattcatgcatttacagccaactcatttttgacaaaggtgccaagaacacacattggaaaaagacaagctcttcaataaatggtggtaggaaaactggatatccacattcaagagaaatggaattagatccctatctgtcactacatagaaaaataattttaaaatagaaaaaaagacataaatgaaaggctcaaaactatgagattcatagaataaaacataagggaaattcatggcattgatctaggcaagtaatttttttgcatttttaaatttattattgctatttttaaaaattgtcatttttattgtgggtacatagaaggcatgtatatttctggagtacatgggatgttttaatacagctatatgattcatatcaatcacatcaggataactggggtatccattgcctcaagcatttatcaatcccttgtgttagaaacattccaattccactcctttaattatttcaaaatatacaataaattattgttgactacaatccccttgttgtgttattaaatattagatcttggccaggcacggtggctaatacctctaatcccggcactttggaaggctgaggcaggcagatcgcttgaggtcaggagttcgagaccagcctggtcagcatggtgaaacctgtctctactaaaaatacaaaaattagccaggcgtggtggtgcatgcctgtaatcccagctactcgggaggctgaggcacaagaatcgcttgaactcaggaagcagaggttgcagtgagctgagatcatgccactgctctccagccagggtgacagagccagattccatctcaaaaaaaaaaaaaaaaaaaaaaggatcaaaacgaacaaatgctaacaaggatgcggagaaaaaggaagtctttttctttttcttttttaacaagagacaggaccacactgtgtcacccaggctggaatgcagtggctcaatcatagctcactgcaaccttcaactgggctgaagcaatccttcaacgtcaacctcctgagtagcttggactgcagtcatgcaccaccacacccagctaattaaaacaattttttttagaaaagaagtctcattatgttgtccaggctactctcagtctggcctcaagcagcctcccgcctcagtctatccagttgctgggattatatctataagccaccaggcctggctaagaaagagaagctcttgtacattgttgctggagtgaaatttagtacacttattatgagaaacaggatggaaattcctcaaaaaaataaaaatgcaactaccacataatccaacaattctactactgggcattaatcaaaaaaaaaaaatgaaaagagtgtatcaaagagatatctgcactattcactcttttttttttttttgagatggagtttcactctttcacccaggctggaatgaagtggcgtgatctcagctcactgctacttccatcccccgggttcaagtgattctcctgcctcagcctcctgagtagctgggattataggtgtgtgccaccacgcccagctaatttttctatttttagtagagacggggtttctccattttggccaggctgttcccaaactcctgacctcaggtaatccatccgccttggccacccaaagtgctgggattacaggcgtgagccaccgtgcccggcctgataagctacactattcacaatagccaaggtatgaagtcaaagtgtccatcaatgaatggacttttagaagtaatatacatagacagtggaatgctgttcagcccaaaaaagaaggaaatcttatcatttgtgacgatatggatgaacctggagaacactgtgttaagtgaaataaaccagacacagaaagacaaattcctcatggtctcattcatatgtggaattttaaaagtcgatccgatagaaatatcaattagaatggtggttactagaggctggggcagttgagggagaaggggtatgaagttttttgttgaaggatacacaattgcacttaggagaaataaattgaagagatctgttgtaaagcacactgactatttgatgatgatatattgtattcttgaaaaacgctaagacagtaggtttttgtttgttttgagacagaattttgctcttgttggtcaggctggagtgcgatggcacgatctcggctcactgtgacatctgcctcccaggttcaagtgattcccccgcctcagcctaccgagtagctgggattacaggcacccaccaccacgcccagctaatttttgtatttttagtagagaggggggtttcaccatattggtcaggctcgtctcgaactcctgacctcaggtgattcacccgccttggcctcccaaagtgctgggattacaggcgtgacccacagcacctggcctaagacagtagattttaagtgttctcaccacacacacacacacacacacacacacacacacacaaactaggtgaggtaatgtgtatagtagttagctagctttaatcattccacaatgtatatatacttcaaaacatcatgctgtacacaataaatacataaaattgtatctgtcaattttaaaaataaataaataactttgtaaacttaagatgatccttataaggtgctaatctcagggcagcttgcataaaagggtcttaatatatctcataattaccaaatgttttatacttggaggataaaataatagttcttaacctgggttataagtatgaaatgtctcattgttctggctaaagcatgatgcaatcagacaagtagtaaccacgcttttaaatcaagagaacacagttcacctcttgctgaagaggggaatagcaattttccagagatatcaagggctgtgctcccagcaaaagtcaatgctttgtagatctaagggacctagccaaaacagcttcctttgtttcgactttggagaaaatgttccctcagggttatggtaatataagaggaggttagaactctggaactcaggccagtcgatagagaaggagaaataaaggctggatgcacctcatgtttaatcaggtgtcttgggaacagaggatgcaggaacaaatatatatatatatatatatatatatatatatatatatatatatatatacaaaaatatatataaatatatataaacaaaaatatataaatataaataaataaatatatatatctatatatatacacacacacacactatatactatatacacacacatatatctttcagtgccaggcaatgtcctatggggatgtgagtggtcagggttggaataacaggaggaaatgtgccaaatgaacagatatacaaagctctaaatatctcctctgcgttggccctcagcaaatgcaaccttggcctgaatgggacatgcttgtttcttttggagtcctccgacttggggactgatgctttgctttctgctgctgtctggtctcaggacagcttccgtctccatcatcaacaatccagggaggaatttgcacctcctcatggaggccttcctttcagaaaactcagcaaggtgagtccaatagcctcagctggtaccagtaggtaccgtaggaaatgtagctaactactatacacttgaccttacctaggttttttttgtttttttttttttttttttctgttgagaacacttaaaatctacttcttaggccaggtgcggtggctcacacctgtaatcccagcactttgggaggacaaggcagttgaatcacctgaggtcaggagttcgagaccagccttgccaacatggtgaagcccaccaccgtctactaaaaatacaaaaattagctggggcgtggtaatgtgctccagtaatctcagctactcgggaggctgaggcggtaccagtaggtaccataggaaagggtcagagagaatggcagctatgaccatggacctgaggtcacctgagagccagtctagactagccctgagcagagaaacttctgcgatcatttgtctgcttgcttgattcatttattcatgtatttgtttatgatactaaaaagaaaagtgaatattgagctcagaattgaagagtgattattgaaagttaagtaagggtaacggaagcccagttggaaggggacatgggagatttaaagtggctccagtaaaagtagaacatttgccctagcatttttgcaattaaatggagaagagaactaggctattagctgtgaagggagatacactgaagtgagggcgtgccttttttaggtttaagaagagacatatttgaggatgttttcacattgatgagaaaggtctaaaccaatgaattgcttccaaatgctacctgaccacagcagtttatgagacaaacatcttgcagtgtcttctctcatgctgttcattcaaatgaaagtttagaagttattcagtaaatgaaaagtgatatactaacaacactaactttgcaattctctcctcacttgtgaggctaaatatatttctgtgtttgttagacatttaccaactctattgcaaattatctgtgcatgttctttgcttttgtttttgttttgttttctgtttttgtttttgttttgttttgtttttgagacagggtctcactgtgttgcccaggccggagtgcagtgacatgatctctgctcactgcagcctctgcctcctgtgttcaagcgattctcctgcctcagcctcctgagtagctggtattacaggctcatgccaccacactcagcttatttttgtgttgttagtaaagacggggtttcaccatgttgcccaggctggtctcaaacttctgacctcaagtgatctgcccacctcagccttccaaagtgtgggattccaggagtgagccaccatgcccagccttgttctttgcttttgtatgatgggtttgtaatgttcttattcctatttttattgcatttttgaaataaaaattggagttgttttcaccgatgttggcatttgtcatgtcattcttttatatatgtatcagtgcatttgagaggaatgtgtgaaaggtcttttttttgttttttcttttttttgagatggagtctcaccctgtcacccaagctggagtgccgtgtcgcgatctcggctcgagtagctgggatgacaggcacgtgccaccacgccctgctaatgttttgtatttttagtagagacagggtttcaccatgttagccaggatggtctcaatctcctgacatcagtttataaagctgatgtagccaaatccatccattggtcatagtgtgtcccctcgttgctttgtaaatgcagaaagctctgtatcattttgccagataaatatccttttatggattacatttccaacttgctttcatagctctgtcatgctttattgcaccttttggctttttgaatttgacctctgtctagaagttgcatctcctttggccatcatttgaaaatcattctttatcatctgactcaagaccacttttatctctcataaacatatttgaatcttcccatatttatgtcatatgaaattataaccttagatacatatgaaggatgaaataacagctcttaacctgtgttataagtatgagatttctaattgttctggctaaagcatgatgaaatcagataagtagtaaccatgcttttaaatcaaacctgctcctacttttttttttttctgagacagagtcttgccctgtcgcccaggctagagtgcagtggcgctatctcagctcactgcaacctccgcctcccagattcaagcgattctcatgcctcagcctcccgagtagctgggattacaggcatccaacaccacgcctagctaatttttgtatttttagtagagatggggtttcaccatgttggccaggctggtctcgaattgctgacctcatgatccacccacctcggcctcccaaagtgctgggattacaggcgtgagccactgcaccaggccagtttctgtgaacattctttttctatactatgcacacatacattttatgcaaatgcacgaatactacagtttatgcaaatgcatgaatactatcctatgcatatcactaatactctatataatagtgtaattttttcatattttttcccctttccttttctattatacaaatcttctaaaagtactttcaaacatttatgttaagtctgtggttctcactgtggtggctttgtctgccaactgacattgagcaatgacttgcctggggagggtcagtaaagaacaaggaagctgttaaatagtacaatgaacaggacagaccccagcacagtaagtgatgcagcccagtatttcagtagtgctgggactgagaaacttgagttaatgaatatctgtattactaatatttatagctgcatctagattgcttccccaagaccctgtaacacttcacatttctgccaggaaaattagagtccccctttgctgcctcttttaaacatccaacccctctcaaggtggcagctgttgaagcttttccccaggctgatggttgtgatagagatttcttgttgtcttaaactattcctgggcttgagcagacagtcatatatatgatcatcgtttttacctacttattattatatgcccatttttctataatttgccacatttcaagtgatttttaaattgtattgcttcttcatggacttgcaagggtatactttttcttatttagctaactacatactaatcttgcttctgtttcttgcctttgttaagatgttttccctacacatagattttgtgtgtgtgtgtatgtgtgttataaatacattttcagtgccaccaaagaaatagcatttgaacatcaatttattttctcagcaaggcaatttttacttctataaaagggtacaactcgcagatggagtaatggtgagagcacacctgaacaagggaggggaaggggtttttattcctgacccacatagcccctactgctgtgtcgttcccctgttggctagagttggaccgcacagtctgagctaattccgagtgactattttaaagagagcaggggtaagagccagaatggcgtggtgagcagtttggcgggaaagatggttacacaacaggtaactaaaggtgacttaggtcagagtgggtgaccggggtgactcaggtcaaagcaggtgaccaggttgagtcaggacagagcaggtgaccaggggaacagatgtgaactactgattaaaactggtggaaaaggtgtttactgaaactacaaggaagttaaactttaaaatggaggacagagaactgaacatattgacatactgattctttgaagacaaatctagaattcactgtatccaacacatgcattttttacttttatactgaggtctttaaacctgctaattctttataggccatgagagagtgggcgaactaattgtctccaggtggatggccatttatagcagctgtcactcaatgatccaaataaattgaaatacaatcttgcatatgttaaatattcatatatattgagacttatttcctgatcattcaacaaatagcatctgctatgtgtcagaacattctaggaatgctatatattatgtaattttatatctaggatgttgccaaataaataacgaattcatttgatatcattaaattattattttatatcttgcttcagttaatttttgatgatccatacaattttatttaatacagcttttgaaattattgtatttaccctggctttattcccctaacattctttttatttcctatcttcttgctttaaattgttggtatataaaacacacatatttgtatatctttgtgaaaatacaaaggtaaacacaacaggagaagttgtacctgtgtggatcttgcattataatgattagagcagagtacaatgctataaatgtgcatataagacaatgtaggatttcattcattgcaaatggttaaaattatcatcatctatgtgggattttatagagtgtggtctggagaggccattgcatgttagatgaagaccagaaccaggactaaatggggccagcggaatctgtcaaaacagaagaccacaaaccacaaaggaaagatgccacacaagaaaagtgagaagggggctgcctcacctactatcagaccatataaaaaccccttgatttaaaacatattaaataagcacaagaaacaacaagtcttctactgtttttgtaaaaaacaaacaaacaaaaaaaatgaattgttggtttatttcatttgctcattttttattggcattctcaagctgtaggtgtcttgacacagagaaaacataattacgtatgtcatttggtaaatttcctttgtcatttataatttttgctgagtatcaaggggatatagtgggactcaaaatatctccacaactaataatgatttttctttcttatggtcccttgtagatcacctgagacttttagaccatttccctcccataatatccacataatttttctctctgtgtgtttattgagaagattattttctatttctttaaacacaaggcagaaaatagccatactaaaatggagctcaaggctacttgtgcatcgagatttccaaagtggaatttctagatatcatttctgttttctctcaagagaaaaattaattgatattgacaacttgcctggtacccactcctttctagtagtatgattgagcacaaaagaatattggtgtaacatagacccagggggtcatggtatgctccatgtgtgtatacattgtgtgtgtgtgtgtgtgtgtgtgtacatgcatgcacgcatgcctttagagtgagaggaggtttcagagaaagggagctttggctctatgttccaaaaggtaactcatcacacagaggccagaactcaaggcaacagtaacagtagcaaacaaagaagaaatgcattgcaattcatgtgacactgtttgcagccaaattagcaaagtgccaatgcaacaacatctggtcagagggactccttgtgtcttcaatttcagccacttcaaagtcagctctttccccaacatcccctgaaaccatctctcatccctctccttttgctcattcccctgctacactggcttccttgctggccttgaacatgtgcaagaagcacattcctctgagtctctcattaatccttccttctgccttgcacacacttctgcgggccacatggtgacttctgccctgccttcactatggtctctgttcatttgtcacctggtctgctggtattgcatcaatgaccagtaaaaaaatagtaaaaaaaaaaaaacaaaaaaaacccaccccgtccacactttccttcttatttcttttttcctcttcaaagggtttgtcaccatcggataccatatggtgacaccatatggtatttctcttgtttgtttgtattctttctctgtcactgatttgcagcaactttttttttttttccggagtctcgctctgtcacccaggctgaagtgcagtggcatgatcttggctcactgcaacctccacctcccaggttcaagcaattctcccgcctcaacctccagagtagctgggactacaggcgcgtgccaccacatccagctatatatatatatatatatatatatatatatatattttttttttttttttttttttttttgtattttttgtagagatgagaattcaccatattggtcaggctggtctcgagctcctgatgtcaggtgatccacccacctcggcctcccaaaatgctgggattacacgtgtgagccaccccacccagcctgtagtgacttttgttttatagaactaattattcaatgtccagacagtatttgtaacacttcagaattcactttatagtcctcaaatgcctaaaaattttctcatgaatactgcagagttcatgcactcagggaaagactgtgagtgggacaagaattcctaaccagggttgtcaaagggatgccctaacagaggctagattcacacgcaaaatgtagaaattaacttcttgtaaaatggaggttaccagagcctgggagaattgggggaggggggttgttggcaagatgatggtcaatgaatacaaaattacagttaaactaaaaaaaagttcaagagatctattgtacagtatgttgactctagtcaatggtaatacattgtatttgtgaaaaatcctaagagagtggatgtagagtgttttcaccacaaaaatgatgactatgtgaggtgatattaattaatattaattgacaagatttagccaatccacaatgtaaatatacttcaaaacatcatacacagcaaatacaaacaattctgtcaacttaaaaagaaataaaatgtattttaaaaattaagttattgaccgtagaatataaatgacagcatttctgataggtttgtaatgcacgctttcatcaagttctttttctctcattttgaaagtcattatcaatcacatagaaccagggaatgatacacagatttcagaatttcttcttctgggactttcagataaaccagaattgcagcccttcctctttgggctgttcttctccatgtacctggtcactgtgcttgggaatctgctcatcatcctggccacaatctcagactcccacctccacaccccatgtacttcttcctctccaacctgtcctttgcggacatctgtttcatctctactacaatcccaaagatgctcgtaaacatccagacacagagcagagtcatcacttatgcaggctgcatcacccagatgtgcttttttgtactcttagaagcactggacagcttactcctgaccgtgatggcctatgaccagtttgtggccatctgtcaccccctgcactacatggtcatcatgagcccctggttctgtggactgctggttctggcatcctggatcatcatgagcccctggctctgtggactgctggttctggcattctggattatcagtgatctggattcctcattacatagcttgatggtgctgtcactgcccttctgcacagatttccaaattccacattttgtctatgaacttaatcaggtcatccgccttgccggttctgatacctttcttaatgacatggcgatgtattttgcagtagggccactgggtggagttcccctcgctgggatcctgtacttgtactgtaagatagttttctccatacgtgcaatctcatcagctcaggggaagtacaaggcattttccacctgtgcatctcatctctcagttgtctccttattttatggtaggagcctaggggtgtactttagttctgctcctacccaaaactctcactcaggtgctgcagcttcagtgatgtacactgtggtcacccccatgctgaaccccttcatctgcagtctgaggaataaagacataaagagagctctgaatcaattcatcagggtagtgccattcttcaggaagtgacagtgatcccagagctctaagccttggactgagaaattgtgatttgtgaaccagattctggaagtaggacttgtctcttctatttattagctggagtttcaatttctttgattgccactattctatagaatttacacttttctgtggaaaactgctccttgatatccaacagtgttttgttttgtttgttttgttttgtttttgtcattttcctacttttccaaagttattcccaaactaaggtcagaaacaaagtggagattcctattagtctcatagagttgtgagctgtgttagcccaaagaataaattacacttggcaactataaagtcattaatgtaatctttttctttttttttgagacagtttcgctcttgtcacccaggttggagtgcaatggtgccaccttggctcactgcaacccccacctcccaggttcaagcaattcttctgcctcagtctccggagtagctggattcaggtgcctgccatcacgcccggctaattttttgtacttttagtagagacggggtttcaccatgttgaccaggctggtctcaaactcctgacctcagagatccgcccgccttggcctcccaaagtgctgggattacaggcatgagccactgcacccagcctcattcatgtaattttattgtagataaatatctgagaccacagtttttcttttctgagtccaccattctttgctctatcactacttgactgctctacttgacaatgtaaaccttaacacattagtgtgtttacagctcatcgtggcatttcattcttctcattaggatcctgtgctctattcagcccagtgtccatggtgcctaccacactccctgggcaggaatagaacaaaaattgcaggctgggtgcagtggctcacgcctgtaatcctagcactttgggaggccaaggtgggtggatcacaaggtcaggagttcaagacctgcctggccaacatggtgaaaccccgtctctactaaaaatacaaaacttagccaggtgtggtggcgggtgcctgtagtccccgctacttgggaggctgaggtacttatacctgactcttacatgggtccacagccttggtccttgatatggtttggctgtgtccccacccaaatctcaccttgaattgtaataatccccatgtgtcatcaagagtggggccaggtggggataattgaaccatgggggcggtttcccccatactgttctcatggtagtgaataaatctcatgagatctgacggttttataaatgagagttcccttgcacaagctctcttgcttgctgccatgtaagatgtgactttgctttttattcgccttccgccatgattgtgaggcctccccagccatgtgggactgtaagtccattaaacctctttcctttataaattacccagtctcaggtatgtctttattagcagtgtgagaatagactaatacatcgtgttaagtgttcttaacaccaaaacaaaacaagaaaaagacacaggatactctgggaaatgatggattgtatttttcgtagagacagggtttcaccatgttggtcaggcttgtcttgaacttccgacctcaagtgatccacccgcctcagcctcccaaagtcccaggtttacaggcgtgagccaccgtgggcctaataaatggtttataaatgaaggacgaggacagctcttgacttgtgtcacaagcggatctcctcattttttcatcaaaagtgttatgaagccaaggagtacggtatctatgattttatatcaaaggaatatagttctctcccttgttgaagaaaacaataacagttttctggaggtatcaggggtgagggctgtgcccaccatgtcaatgctttggaagtccaagaaacctagtcagggaaggttcttcagtttttgagttttggggaaactttctctcagggttgggacaaggtgatgggaggttagacctctggaaagcagaagagttcatggagaaggaataataaagactagatgcgcctgactctttttattttattttattttattttactttaagttctgggatacatgtgcagagcatgcagtttggttacataggtatacatgtgccatgtcgtttgctgcccctatcaacccatcatctaggttttaagccccgaatgcattaggtatttgtcctaatgctctcccttcccttgtcccccaccccctgacaggccccagtgtgtgatgttcccctccctgtgtctatgtgttctcatgatgcacctaacttttaacttggactcttgaaggcaaagaatctgcaagaaaagtttcctttctgtgcaaagcaatgtcccacaggaaaatgatgtgctgggggtctgaataataagctatgtgcccaacaagcagatacagagagctataaatatcactgttgtccctcagcgtgtacaaccttgggctggaagggacacatgtgattatttattctggagtgctaggtctacctcagggaccagtgcttgactccttcctgctgtcttgtctggcgacagagtttcagtctccaccatcaaccattcagagaagaatttgaattcccacacagagactttcctctgagagatcccatccaggtgagtcggagagcccagtagctacttcagaaaagcttcagagagaatagaaacagagaatatttacccgaggtcacttgagagtcagttcagcctagtccagagcccagagattgcagtggggtttttttttttttttttgcttgtctgcttaattaattcaggttttcgtttatgacgctaaaaagagacatgaacattgacctcagcaatatactgctcgctgttgatatttaagtgatggaagcataatgagaagaggaaactgtaggcatagagtggttccagtagaagcagaacaaatgtccacgaatctctacaattttcggaagcagacaaatagggtattggctcgggagggatacacactgatgtgagcgcattctctctttttttttttttttgagaaggaatctggctctgtcgcccaggctggagtgcagtggggagatctcggctcactgcaacctccacttcccaggttcaagcgattctcctacctcagcctcctgagtagctgagactacaggcgcctgccaccacgcccagctaattttttgtattttagtagagacgggtttcaccgtgttagccaggatggtcttgaactcctgaccttgtgatctgcctgcctcgacctcccaaagtgctgggattacaggcatgagccaccgtgcctggactcttttgtttttaagatggagtatatttgagcatgcttccacactggtgagaaagatccagaccagtggattgtttgctaatgctaccttacaacagtagttcatgaggcatacgttttgcagtagtctcccttcatgctaggtagtcagatggaaaaagtatacattggataggtggaaatgggtgcactaatgagctttatttgcgattatttcttcactgctgagtctgaatatatttgtgggtttgttagacatttactttctcaattgcaaattgtctgtgtgagtgctttgctttcgtggagtgggtttgtttgcagtgtctttatttctgtttttgattgcattctttcaaacataagaactggagttttaggccaggcagggtggctaatgcccataatcccagcactttgggaggctgaggtgggcagattgctggagctcaggagtacgagaccagcctgggcaacgtagtgaaatcccatttctacaaaaataaacacaaaaattagccaggcatggtggcatgcacgtgcaatcccagctactgggaggctaaggtgggaggatggcttgagcccaggaggcagaggttgcagtgagctgagatcatgccactgcactccagcctgggcgacagagccagaccttatctcacaaaacaataaaaggaattggagttaaggtggggtatatttgagtatataccaccacctttgctgtttaacatttggttatgttatgtacatatagatgtactgcatattttatgtacgtatagacgcatctatacatgtgtagatatatgaaagtttgtaagttttgtgtgatcaaatctatctgtcatactgtgttcccctgattgcttttataaacatacaaagttcttctgcatcatttgagtaaataaatggcctttaatacgtttccaatttatttttgtctgtgttatttgtaattgcacctttgtccttttgtcgttcaatctatttctacaagtcacactgtctttgaccatcatttggaaggcattcttcttcttcatttgactaaagatcacctttatcttttataaacatatttgatccatgtttctttacgtaagataaaactataaatttagatatctgtcgctcaattatacagtatattctcttgtgactaggtctgtgttttgttttgttttgtttgttttcttttttgagacagagtctcgttctgttacccaagctggagtgcagtggcatgatcttggctcactgcaacctccgtctcccaggttcaagcgattctcctgtctcagcctcccaagcagctgggattacaggcatgcgccaccacgcctgtctaatttttgtattttttggtagagacggggtttctccatgttggccaggctagtcttgaactcctgatctcaagtgatgcttctgccttggtctcccaaagtgctggaattagaggcatgagccaccacacccagccttgtcctggtgttttatgtttgtactttaataaattggctccaaagatgtcccatgaattgaaatgcatctcctgtttattttcatatgctgccttgtgttctgacctctgtattctgagtcatcttttggaatatattgagtctagatccctttattcttaaaaggaatatttctacctcagttgtatgttatattctcttatgcgtaggtctttgcgactatatttatccacattgaaatcattaaattactgctatttcgtgtctcgtttcggttcattactgatgcttcttttgattttatttaatatattgttattttgaaaccactatatttaaactgattttattctcttgccattcttttcatctcattacttctcattttcttaaaacgtgtttctatacgatgcacatgtattcacatacatttgtgaaaacacaaaagtgaacaaagcaagttaagtccccactcatttatatttggcatgagaatggtgaagacagaatacaatgaaataaatgtgtgtatgacacgatgtcctcagggattaattgcatgaagaaggcatttcagtgtaaaaggacttgtcacagtgtgcacagaattttacgtaataatatcagcgaagcctttgcatgttgcaaaaagaccagaaccagaactagagcgtgcccgtgggattgtaaataaagagatcaaaatccaaaacccccaaaaaaatagcaaagaatagattgccggccggcgcagtggctcatgcctataatcccagcactttgggaggtcgaggcgggtggatcacttgaggtcaagagtttgaaaccagcctgaccaacgtggcgaaactccatctctgctaaaaatacaaaattagctgagcgtgctggcaggcgcctgtaatcccggctactcaggaggctgaggcaggagaatcacttgaacccgggagatggaggttgcagtgagccgagacggcgccattgcactccagcctgggcaacaagagtgaaactctgagaaaaggtgcccacctcttcatcttctgtcggaccatataaaaaccaattttccaaatcaatatgaaataggctacaggaaaaacaagttttttactgtttcatatattaaaaatgcccaaatttggttgttcttggttgagctgttggtttatttcctttgcccattctttccatgggtatgttcaatctctaagtgtcttgaccccaaaaagatttcatgacttctatcttttggacagatttgttttttatattctattattttggctgagtatcaaggagacatattgggagctggagtatggctgtaaccaaggaaacttttctcttttttctttttcttaattttttttttttttttatttccatgggttactggggaacaggtggtgtttggttacatgagtaagttctttttttttatgagtaagttctttagtggtgatttgtgagattttggtgcacccatcacccaagcagtatacactgcacataatttgtagtcttttatccctcacccccttcccaccctttcctcctgagtccccaaagtccattgagtcattcttatgcctttgcatcctcataacttagctcctacttatgagtgagaacatacaatgtttggttttccattcctgagttacttcacttagaataattgtctccagctgggcgcagtggcgcatgcctgtaatcccagcactttgggaggctgaggcgggcagatcaccttcggtcaggagttcgagaccagcctggtcaacagggtgaaaccccatctctactaaaactataaaaattagccgggcgtggtggcaggtgcctgtaatcccagctactcaggaggctaagacatgagaatcacttgaacgtgggaggtggaggttgcagtgagctgagatcatgccattgcactccagcctgggggaaaagagggagactttgtctcaaaaaaaaaaaaaagaataattgtctccaatctcatccaggtcactgcgaatgccattaattcattcaagcaagctatttcttcttcctagtctcccaggaattatctgaggttattagattttccccccttgggttttatttaattatcctctgtatgtttatcaagcaaaattgttgtatttttataattttttatgtttttttaaacagaagacagaacatgaccatacaaaaaaatggaaagataatctgatattgaaagcttgcttcatttccattcctctctaatattaatggtgtgactggaggtgagaacagcttgctataaacacagtcccaggagtcctcattcagcttcaagtgtgtgcctgtgtgtgtgtctgtactaattgtgcatatgtgtgtctgtctttagtggggagagtgatttcaaaataacatcattaaacagaattgaaaggagccttgctaattaactgaaacaagatatgaagtagcaataatttaatgttttcaacatggataaataattaaagttgcaaagacctaggcataaaagaatatgacatacaaatgaggtagagatatcccttttaagagtagagggacgcagtggctcacgcctgtagtcccagtactttgggaggccgaggcaggcagatcacgaggtcaggagatcgagaccatcccggctaacatggtgaaaccctgcctctactaaaaatgcaaaaaaattagccgggcgtggtggcgggcgcctgtagtcccagctacttgggaggctgagtcaggagaatggtgtgaacctgggaggcggaagttgcagtgagccgagatcgcgccactgaactccagcctgggcaacagagcgagactccgtctcaaaaaaaaaaaaaaaaaaaaaaaaagtaaagggacctggactcaatatattccaaaaggtgactcagaatacagaggtcagcacgcaaggcagcatatggaaataaacaaaggatgcatttcaattcatgggacatggagccaatttattaaagtgcaaatagaaaacatcaggacaagcctgggcgtggtggctcacgcctgtaatcccagcactttgggaggccgagacaaaaggatcacttgaggtcaggagtttgagaccagcctggccaacatggtgaagccccatctctaccaaaaaatataaatcttagcagggcatggtagcaggcacctgtagtctcagctacttgggaggctgaggcaggagaatctcttgaacccaggaggtggaggttgcagtgaacccacatcatgccactgcactccagcctggccgacagagtgagactctgtctcaaaaccaaaccaaaccaaacaaaatctgggcagagggacttcttgtattttgaagcttcagcagcaatgaagtcacctcatagtgcaacatcttctgacaccatctcccatcacttacctctcacagatttccctgccacactggcttcctcgttggccttgaacatctgaaaccttcctctacacctttgcaccggccattctttctgctgggcacacacattcccagatatcctcatggctcccgccctgtcttccttgaggtctcatttctctttttaaaaatttcagcttttcttacagattaaagggtacatgtgcaggtttgttacacgggtaaattgtgtgatgctgaggcttcgggtcctaacaatcccatcactcaggaggtaagcataggacccaacagatggttcttcagctcacatccccctccctccatcctctgtccagcggtctccagtgtcaattgttcccatctttgtgttcacgtatattcgatgtttagctaccatttataagtgagaacatgcgatatttggttttctgttcttgcattaggtcgctcagaataacggcctctagcttcatccatgtagctggaaaggacatgatttcattcttttttatggctgcctagtattccatggtgtataagtaccacagtttctttgtccaatccactattgatgggcacctatcaccttgactgctagtattctctggacacctaggaaaattaacatcctctatccaccctcgcctttttaccttctttctttttcttgctagccctggttaccatctgacacagtatatgatttacttgtattcttctccatacttcactgtaggaacttttgtttttcagcactgttcactcattgtctagacagagcctggaacgttgacaacactcaatttaaattcctcaaatccatgaaagaatttatcattaaagtattggtttttgttttgttttgttttgttttgtttgagatggagttttgctcttgtagcccaggctggatggagtgcaatggcgccatcttggctccctgcaacctctgcctctcaggttcaaatgattctcctgcctcaacctcccgagtagctgggattacgggcacgcaccaccacatccggctaactttgtatttttagtagagatgggttttctccatgttggtcaggctggtcttgaactcccgacctcaggtgacccgcccacctctgcctcccaaagtgctgggattacaggtgtgagccaccgcacccggcaaagtttttaaataaatgaccatttggggaaaagttgagcatcatgggaaaggaattcctaagcagagatgggatgggagatctcataaagtagaccagattcacacacaaaatatagaaattaacttgctgactgtaggatataaataatagcttttctgatgggtgaaaaaagcatgcttatgtcatgtattttctctctctctcttttttttttttttatagtcacctctaccacatggaaccagagaatgatacacgaatttcagaatttcgacttctgggattttcagaagaacccagactgcaacgatttctctttggtaaaaggcaaaagatttatacaatttgaagagaaaccagagcataacgatttctctttggagtgttcttatccatgtacctcatcattgtatttggaaacttgcttatcatcctggttatcattttatgctcccacctccacacctccatgtacttctttctctccaacctgtcctttgtagacatctgttttgcctccaccagggtcccaaagatgctggtgaatatccaggcacagagcaaagtcatcacctctgcaggctgcatcacccagatgtactttttcatacattttgtaggattggacagcttcctcctgactgtgatggcctatgaccggtttgtggccatctgtcaccccctgtactacacggtcatcatgaaccctcaactctgtggattgctggttctggtatcctggatcacaagtgtcttgcattccttattacatagcttaatggtgctgcagttgtccttatgcagagagttggaaatcccccactttttctgtgaacttaatcaggtcatccaccttgcctgttctgacacctttcttaatgacatggtgatgtatctggcagctgtgctgctgggtggggggatgtctcgctgggatcctttactcttactctaagatagtttcctccatatgtgcaatctcatcagctcaagggaagtataaggcattttccacctgtccgtctcacctctcagttgtctccttgttttactgtacaagcctaggagtgtaccttagctcggctgcatcccacaactcacactcaggtgcaatagcctcagtgaggtacactgtggtcacccccatgctgaaccccttcatctacagcctgaggaataaggacataaagagggctctgaagaattctttgggagggaaactagaaaagggccagttgtcctagggctgaagctatatccatgattgcaaggctcaaagcctcagagccagatattgctgttgtttaatcagatcatggaagtggaaactgctcttttttttttttttttttttttttgagacagagttttgctctgctgcccaggccagagtgcagtggcgccatctccgctcactgcaagctccacctcctgggttcatgctattctgctgcctcagcctcccgagtagctgggactacaggcacccaccaccgcacccggctaatttcttgtattttcagtagagacggggtttcactatgttagccaggatggtcttgatctcctgacctcgtgatccaaccgcctctgcctcccaaagtgctgggattacaggcgtgagccactgcgccgggctggaaattgctctatttatttcctgaagtttccatttcttttatctcaactgcttcatcaaatttaagcaactcctattattaagctttcctctctctctaatattcaacagattttccccttgttttcctcctttctcaaagttattcccaaccttgggtcagaaacaatttggagattcccatttgcctcatagggtgatgagttgtactattcctatggaataaactacgcttggcactgaggccatttatgtaattttattggagaagaatttctgaggctatggtttttcactttttgtgtttgtcattcatttctgtatcactaccttaattgatcttcctgataatgtagacttaaacatactagggtattttatagctggttatgggatttttcactcccattaggatcctgttctcttcttgaactcagtattcatgaattctactatatttactggcactgagtacttagtcaaaagttgctcatcaaataaatgctccaagcatagtctacacagaaagacaaactggcaaaaatcaattggctttacatggacttagagttagagatgacgttaaatatgatagagtaacattttcaattatgtactaaatttctatggaaggtttgttttcaatgatgtacatctactcattgaagtgtggaagcttgttattcatgtgtaatgaggtttgttgatctgagtgaaagatttggtgtcatggtctatattattttattgtatcatcttgctgtttctatttgaaaattctagtgttacctacaaatatgactacttacattgtccaaaaaatatttccccctttaacaaatgtaatcataacacaaaatacagatgattgaacaatatgtgtatttacttgatcatcaattcctttacatcttttataatctaaattcttttcagtcctcatgatcaaagattattctgttgatatctggatatttatatctttcctgaaagttggaaagttttcagttatttttttgataagctttctgtctctttgttcattccttctctttcttgattcctgttaattcaaatatttaccctccttatgctgccccataaaatcccataagttttcttcactcctttttattctgtttttctcctctgagtgtatgttttctaataatctgtcttcaagttcatagattatttcttctgctttatttcttctgctttatcaatcctgctgttgacactctagattgcatttttcatttcattcattgtatttttcatcttgagaatttctagagtttttttataatttcaatctctctgttaaatttcaaattttgttcatttattgtctttctgattttggtgaattgtttctctgtattttcttaaagtttgctgcacttccttaaaacaattatttttgaattctttgtcagaaagttcatatatctccatttctttctttttatttaaaatatataaataaatatataattgttttttaaaaaaattaaaaatcacaatacaacaataaaaataatacaaatttttaaataaagtataacaactatttacagagcatttacactgtgttcagtattataagtactctagaaatgatttaaagtatacaggagaatgtgcatagctaatatgcaaatactatgccattttatataagggacttcagcatcagtggattttgttatatgcagggtgtcctgaaaccaatcccctgcaaataaggaatgacttactataaagaagaaaagtgagaggttcgcccaggaataaggcactgaccagatgaatgtttcatcacttgaacacatgagcattgtaaaccctatagtaggtcttcccatctggtgagaaagatctcatcttgttgattattccttcaggcagaaaattgtcactcagaggggatgctgtgtctcactattcttattttctggaactgttttaatggtattttatttgggctttaaaaatcagtcctagccatgcatagtggctcatgcctaaaatgtcagcattttgggaggttgaggcaggaggatcacttgagcccaggttgttcccagaccaaagcaagggtcaggctgcttattctcatggcccattaatgagatgcagatgaactagggaggaaaagagtttttatttctgtaactggttacagggagaaggcctggaaattaccactggatcaactcaaaaattacaaagtcttccagagtttatataccttctaagctatatgtctatgtgtaagtgtgcattcatctaaatacataagtgattaacttcttttaatctataactaagatctgagtcctgaagaccttcctctggagcctcagtaaattcacttaatctaaatgggtccaggtgctggggtgattacccttatcttgtctcctgctaaatcatggaggtttagggagttccttcagacccccaacaaacttgtttgtggaggcctggggagtttcttcagacccccaataaaacttgtttaatcctaaatgggtcctgttaagaattccttcattatcttctcacgtttcagggcccaggaaaggcctaggcaaagctctgggtagccttttttttttacattccagcctttgtataaaggcactggccctatcagtttttaatatttaacttaaccactcagtcagtgctgaaacagttgttagagaggtctgctttagtaggacctagcctgctacaaggtgtttgagaccagcctggccaacatagcaagaccccatctctaccaaaaaaaaaaaatgaaaaaaaaattagtcctttgtgaattgttaaagacggtctatattctctggaatggaataacaagcagcatccaatggacttgttttgaacctgtaaaagtgtagatacctgcagggtcctgcctggacagccaggcaaaccacctctcatcttctcttcgcgtacctggaactttctctatattgcaccttcaatagtaagaatagaacttgtggcaaagtcattggaatggttttgttcagagttgtgtgtggtccctgtccacaactccaagttaagttgctcaggactcaaaggtctttttaaaaaacaaaaaaacaaaacctgcctgctcgtgcgcaaagaaactccatctaaaatgttgaggccaggcgcggtggctctcacctgtaatcccagcactttgaggggctgaggccagtggatcgcttgacgtcaggagtttgagaccagcctggccaacgtggcaaaaccccgtctctactgaaaatacaaaaattagcctggcatggtggtgggtgcctgtagtcctagctactcgggaggccgaggcaggataattgcttgaacccgggaggcggaggttgcagtgagccgggattgtgccactgcactccagcctgagcgacagagcaagactctgtctcaaaaataaatagataaaaataaaaaaataaaatgttgaggaaaccatcactggggaggacaataaacaatggaagccacatcaggcagaaaagagtatcataagcaaagagccccagagtaagggattcccatacctggtatccaagatgctcccaagaatacaaaactagcagaaaaaagtgtttctattttggctccctcactcatgggaatgaaattgcttagagaatagagttagaacggagtgattaatttaatgagcattcatgagaattcaacctctaagtctgatagtaaatatgccccttacacctgttacttactgctcaaatgttccaggaagcagggagttcgactttcagaggacttatgcccaaggccacatctccgtccatccctgaagctgagttgaacctccatcacccagggaagaaaggacctagggaactagaggctcagcaatgccctggagcatctgaggtggggaacaggtatggaggcaggcagagctctcaaaggaagaactttggcggtgtaaatggggacagtgtggtgaggacagtccattcacttaaagcatcctgcacaatgaattcctgtgtctctcttagctcttcctcttagctccctctcaggtgtcttcctctctcttccaggaccaaattctgaggctctttcgccttcctaataaaaattgacgtgttagcttctagtatctctcaaaagtttcttacccagccatcttagctgtttttctggagccatttaaagtgcttccaagaaataaaataagaaaaacaaaaaagaaaaagaaaaaataataaaaatgcttccattctcctgtatcaaagatgctcctatgttgtttacccataatatcttactcagttactcattcattcattcacttaagaaacattccctgagatttcatagttagcactcgcaagcccattgcatacatcttctgacattagtttacttaatatttctgtgtctcagtctccatatctgtaaaatgagtataatagtcatatccatttcatggggttaagatgagaattaaattagatctaccctatgatccactaatcccactgctgcgtatatattcaaaagaaaggaaatccatatatcgtttttgtttttggttgttggttttttggttttgggtttttggttttttgagacggagttttgctctgtcaccccagctggagtgaagtggcgtgatctcagctcactgcagcccccacctcccaggttcaagtgatcctcttgcctcagcctcctgagtagctgggattgcaggcacccgccaccacacccagctgatttttgtatttttagtagagatgggctttctccatgttggccaggcttgtcttgaactactgacctcaggtgatccacccacctcgtcttcccaaagtgctgagattacaggtgtgagccaccatgcccagcctggaaatctgtatatcaaagaaatatctgtacttccatgtttattgcagtgctattcacaatatccgagatatggaatcaacctaagtgttcatcactagatgaatggataaagaaaatgtggtacctaaacgaaggaatactattcagaatgaaatcctgccagttgctgcaacagggatgagactgggggtcattatgctaagtgaaataagccaggcacagaaagacaaatattgcatattctcactcatatgtgagagctaaaacatgttgatctcatggaggtagaatgtagaatgatagttatcagagagtgggaagggtgtggggtgatgaggtgagattgactcatgggcataaaaacacagttagaaggaatactttctagtgtttgacagcacagtaggggtctatagttaacaataatttattgtatatttcaaaatagcaagaagagatttgaaatgttcccaacacaaataaatgataaatgtttgaggtgatggatatgctaattactctgctgtgatcattatatattgtatgcatatatcaaaatagcccatgtaccccataagtatatacaattattatgtatcaattttttaaataactataataaatattttaaattaaaatgaggattaaattggctgggcgcggtggctcacgcctgtaatcccatcactttgggaggccgaggcaggcggatcacgagttccagagatcgtgaccatcctggctaacatggtgaaaccccgtctctactaaaaatacacagaaaattagccgggcatggtggcgggcgcctgtagtcccagctacacgggaggctgaggcaggagaacggcatgaacctgggaggaggagcttacggtgagcggagattgggccactgcactccagcctgggcaacaaagcgagactccatctcaaaaaaaaaaaaaaaaaggattaaattaaagatcatgcataattttttaatagtctccaagatctagtgaacacctactcatgttaattattattagtgcattattataaacacattttcattcattaaatcaaaaaaattgtgatgatggtcaaatgaactaagacatataaaatatttgacaagtgcttgacatgcaaaagtccttaatagattttagctattattacttttatttgttgagtatttacaagtttccagtccctgttccaggaattttatattcttggatttttttaaatttctttttaacttttaagttcaagggtacatgtgcagttttgttatataggtaaatgtgtgtcatgagggtttgttgtacagattatgtcatcacccaggtgttaagcctagtacccattagttattcttcctgatccactccctcctcccctactccaccctccaataggccccagtgtgtgttgtttccctctgtgtgcccatgtgttctcatcatttagctcccacttataagtgagaacatgtgatatttggttttctgttcctgtgttagtttgctaaggataatggcccccagctccatccatgtccctgcaaaggacatggtcttgttttttgctatggctgcctagtattccatggtgtatatgtgccacattttctttatccagtctatcattgatgggtatttaggttgattccatgtctttgctattgtgaatagtgttgcaatgaacatactcatgcatgtgtctttataaaagaaggatttatattcctttgggtatatacgcagtaatgggattgctggaccaaatggtatttctatctttaaatctttgaggaataaccacactgacttccacagtggttgaactaatttacactcccttcaacagtgtataagctgttcccttttctccacaacctcaccagcatccatgcttgttaatgtttgaaatgatggagatgtatttttaagagattcaactgtacatatgaatgctacttttatttttccttggactcaattttttgttaatttttatttttgaataatttggatttacagagtagttacaaagagagtacagagttcccataattcccttacctattcctatgggaactaggtaaaagcaatggttgaaaaacattctgaatgtccctctgaatgccaccttagaatggctactgctttttacagatttgttttgtttcagctgccttattaaaatcatgctcagttaaaataagttttcaggctgggtgtggtggctcacgcctgtaataccagcactttgggaggctgaggtgggcggatcacaaggtcagcagttcaagaccagcctgaccaacatagtgaaaccccatccctactaaaaatacaaaaattagctgggcgtgttggcgtgcacctgtaatctcagctactcaggaggctgaggcaggagaatcacttgaacccaggaggtggaggttgcagtgagccgagatcatgccactgcactccagcctgggagaagagcaaggctctgtctcaaaaagagaaaaaaagaaaaaaaaaagaataagttttcagctaccaatccatcatccacagccaatccatcatccacagccaatccatcatccacagccaatccatcatccgaaaacaaagttatgttgcctttttaatataggtctcatttctttttctccttgtattgcattggttgaaacttccagggcactgacaaataattactaataataaacatacttttcctttttaattcttaaaggagaattctcctgttgttcctgccacacagcctcaccagggcatttttggaagtaagttctgtttatttaattccttccttagttattgatctgttttcctccatcccgaatcaactttgggcacttatgtttttccagaaataaattcatttcttggggattttcacatttttaacatggcgttataaatgacattatcttgcaaagttgagtgtttccttatctctgtgttcatttttttctcattcttggttttaggcctttctgctctttctccctctttgtatcccttttgttacacttctaattttttctattcgtttgtggttgccaaagaattcgctctggaatttatttttcagttccagaatatttcttctttttagttcattaattctgctttgatctttattagctactcctttctgttttaacagaatgttaaatattttgtgataatttttaacaaaatcaaattttacaatattgattttataacacttgtattgacaatatcttcaaatttttaagtttttatttcttgaggataggctacacatgtattcatttgcaattttcaaacaatatgctaaaaaaggaatctaaaaatcaaaattaatgttaacactcaaagatgatccctcttcatactttggggtatgttgttatggatcttttttttcttttggtgccaatatgtgtatagtttaagagatccataggctgagttcatttctctagctcagaaaaggagaccaaatgtcttttcatagcagtatctgaaatgttttctttccacatgatggaatttttttttccccctagatggagtctcactctgtcgccagactagattggagtacagtggcgcgatctcggctcactgcaacctccgcctcctgtgttcaagccattctctctcagccttccgagtagctgggagtagctgggattacaggcacgtgcaaccatgcccagctaatttttgtattttcagtagagacggagtttcaccatattggccaggatggtctcgatctcttgacgtcgtgatccgcccgccttggcctcccaaagtgctgggattacaggcatgagccaccgcccccaaccgaaattttgcattcttactcttctttcatacagacattttaattccctcagtgaaaggggtatgttattgttaattttacttttttagattaacagtaaaaataaaacattttctcaaacatttattatccttttacagttcattttatgaacctttaatattctatttattttccccatcagtgcattaatatttcaatgatttataattgtctttataaagatattaacttttgtcagttacataaattttttttttgcattctaactttctgcaaggcacattttctcattcagaatttttcaatttatggttctagttgctgatctctttttctatcaaaggtgaattattcagaaagaatttgtactttcaaagattatatctatccatgtataaatttatataatctatatgtttatctatgttttcttcagatagcttatgtagtctcttgtctgtttgaaatgtatttgggactacagagatgggatttgacattattttttctaaataattaatcattaaacacttatttatacctttaaaaaacactatttaaaataactaaaggaggccagggaagatggctcacacctgtaatcccagcactttgggagcctgaggtgggtggatcacctgagatcaggagttcaagaccagcctgaccaacatggtgaaaccccgtctctactaaaaatacaaaattagccaggaatggtggcacatgcctataatcccagctacttgggaggctgaggcaggagaatcgcttgaacccgggaggcggaggttgcagtgagccaagatggtgccattgcacttcagcctaggcaacaagagtgaaacttcatcttaaaaaaaaaaaaaaaaaaaaaccacaaaacaaacaaacaaaaaactaaaggattataattggattgcttgtaacacaaaggataaatgtttgagaggatggatgccccattctccatgatgtgattcttatgcattgcatgcctgtatcaaaacatctcatgtaccccataaatacatacacctattacgtacccacaaaaattaataataagttttaaaaagagaaataataaataagacctagtatttgctagcacaacagggtgagtacagtcaaaatcaatttaattgcacattttaaaataacaaaaagaatataatttgattgtttgcaacacagaggataaatgcttgagggaatggatgctgcattttccatgatgtgattactatacgcattgcatgcctgaatcaaaatatgtcatgtaactcatagagatatacacttacccacacaacttaaaaaaataaaaaaaaaattttaaacacactcaagtatccagaaataaaaaatgcaagttaacgtgataaaaattacacattctaaatcacagtgaacatcatattaaattacaaaactctagggttattctatttaaaaaagaagaagaaaaagaagaatgccaactcctaccataaattttaaaaggattctaaaatttcaaaccaatgcaataagacctaaaagagaaataggtgttattaattagtattatttggagaaaatagatgaattttagagaaaaacatgaaactaagaagaaaacccagaaaaagaatatggcacctcttcaatacaaaaaaagcaaatgacttcctaatataataccaatagcagagatgttatgtgggggggtattacattaaaatattaagaaattaacataatctatatgtgtatttttaacacgtgaacaaaaatgtctacccaaaaaaggattaaaatatgcagaggaacatttctgctactggaatgagaatttgaacataataaagatgtcaatttctctccaaattaattgataactttaatgtaatctccaataaaattccaatggtatttttcttgcaacatggctagaggattctaaagctcatctgggaggataaactggcacatcagaaataaaattatgaaagaaacaatactaagcaaatttctcaactcaatgtttaagtatattttgaagatagacaattaaaaatatggaacaaaagatttgataccctgcttgctgtcatggcacagatgaccatttaaaattatctatttataagagtgtgaacaagaaaatgtcttaatgtttttgttgttgttgttgttgttgttttttgagacagagtctcgctttgttgcccaggctggagtgcagtggcgtgatctcggctcactgcaacctccgcctcctgggttcaagcaattcttctgcctcagcctccctagtagctgggactacaggtgtgtgccaccacgcccagctaatttttgtatttttattagagacggagtttcaccatgttggccaggcttatctcgaactcctgacctcgtgatccgcccaccttggcctccgaaagtgctgggattacaggcgtgagccaccgcgcccggccggaaatgtcttaattaaaaaaaaaaacaacaacaactgagaaaggccatttacagattaacctaagagaagaaaatataaaaaatataaaactatagttaatcaaaaactttctttgtctttaagaaaacttagaaagtaagtaaatgtccaacatggacaagttttaaagagccatttctgtatggcagaatattttgatctgatggaatcagatgatggaaaatggggataaaatttaattctatatctagaaactctagggcttttctatttcaaagttccatttttgttgagtttagctagggagattgataatataaatgaaatgtaaacaatgatgattaaaaacagtggttattattttttagcagaaggggcatccaagatccagaggatttaacatgtagacattacaactgggcacagtggcttgcacctgtaatcccagctacttgggaggctgaggcaggaggatcacttgagcccagaagttcgagactgcagtgagctaggatggcgccactgcactccagcctgggcaacagagccagaccttgtctctaaaacaaaatgaaaaataaattacaggaatgcagcacaatagaagaaaaagccttctgaggattgacaatctgcctagaattagggaattctcattgcctgatttcctaatccccatgccttaggcagaaagggcaagagcagccaccagggatgctgcggtgggaaggattgcttagggatacaggcaagcgctgaagcaatagtcctcaaacttgagtgtgcatcagaattccctagagggcttgttaaaacccagaatgcaggccaggcacggtggctcatgcctgtaataccagcactttgggaggctgaggcgggcggatcatctgaggtcaggagtttgagaccagtctggccaacatggagaaaccgtgtctctcctaaaaatacaaaaaaaaaaaaaaattacctcagcgtggtggtgcgcgcctgtagtgccagctactcaggaggctgaggcatgagaattgcttgaacctgggagccagaggttgcagtgagctgagattgcaccactgcactccagcctgggcaacagggtgagactctgtctcaaaaaaaaaaaattaattaattaaaattaaaaggccaggcgtggtggctcatgcctgtaatcccagcactttgggaggccaacgcaggaggatcacgaggtcaggagttcgagaccagcctgaccaacatggtgaaaccctgtctctactaaaactacaaaaattagctgggcgtggtggtacatgcctgtaataccagctactctggaggctgaggcaggagaatcacttgaacccgggaggcagaggttgcagtgagccaagactctgccactgcactctagcctgggcgaaagagcgagactccatctcaaacaaaaactaaaccagaatgctggctccatacccagagtatcagattcagtcggtcaggtgggcatgataaggcacatgtctaatgagttcccaggtgatgctgatggggctgttccaggaaccacagtttaaggaccaatgatgtagagatgacttctccaggtagcgatggtaactgtaacttgtcggcaaagaaatccaataattagccaaaatgcatgatttcttgagttccctgggtttgaataaaggatattgcagtcattctggggaatgcttatttggagtaaattttgtgtggctgttttttttcctccttctcggcaaacccagcggccccatggaaagaggaaaccaaacagaagttggaaactttctcctcctgggattcgcagaggactctgacatgcagcttctcctccatgggctgttcctctccatgtacctggttaccatcatcggaaacctgctcatcatcctgaccatcagttcagactcccacctccacacccccatgtacttcttcctctccaacctgtcctttgctgacatctgtttcacatccacgactgtcccaaagatgctggtgaatatccaaacacaaagcaaaatgatcacttttgcaggctgcctcactcagatattttttttcattgcatttggatgcctggacaatttgctcctgaccatgacggcctatgaccgcttcgtggccatctgttaccccctgcactacacggtcatcatgaacccccggctctgtggactgctggttctggggtcctggtgcatcagtgtcatgggttccttgcttgagaccttgaccattttgaggctgtccttctgcacaaatatggaaattccgcactttttttgtgatccttccgaagtcctgaagctggcctgttctgacaccttcatcaataacatcgtgatgtattttgtgaccattgtcctgggtgtttttcctctctgtggaatcctattctcttattctcagattttctcctccgtcctaagagtatctgccagaggccagcacaaagccttttccacctgtggttcccacctctcagtggtcagcttgttctatggcactggccttggggtctatctcagttctgcagttacaccaccttctaggacaagtctggcagcctcggtgatgtacaccatggtcacccccatgctgaaccccttcatctacagcctgaggaacaaggacatgaaggggtcactggggagactcctcctcagggcaacgtctctcaaagaggggaccattgctaagctctcatgaattgcagtgaacacaatactgaggccagactggcctctttcagccaatatttcaacttctgtttttatgcatttttttgagacggagtcttgctctgtcgcccaggctggagtgcaatggcgtgatctcggctcactgcaacctccgcctcccaggttcaagcaattctcctgcctcagcctccttagcagctgggattacaggcatgcgccccaattcccggccaattgtttttatttttagtagagatggggtgtcaccatgttagtcaggctggtctcgaactcctgacctcatgatccacctgcctcggcctcccaaagtgctgggattacaggcatgagccaccgtgcccagccacttctttttttttttttcaagaaggagtctcactctgtcacccaggctgcagtgcaatggtgcgatctcggctcactgcaactgccgcctcccgggttcaagtggttctcctgcctcagcctcctgagtagctgggattacaggcacccgccaccatgcccagctagtttttgtatttttagtagagatggggttttgccatgttagtcaggctggtctggaactcctgacctcaggtaatctgcccgccttggcctcccaaagtgctgggattacaggcaatgagccaccgcaccctgccttcttttatacatattaaagcatctcttcccttgcatcttcctttggaacgtttcctgcccttgctactgctaataaagttatataggatcaccctttttgactttctaaccagtaatcttaactttgtatgaatacaacctggtgttttctctgttatctttagtaatgatttggattttgttttttgtttttgttttttgttttgttttttgtttttgtttgtgtttttgagacagtctccctctgtcgccctggctggagtgcagtggcgccatctcagctcactgcaacctccacctcccgggttgaagcaattcccctgcctcagccttctgagtagctggaactacaggcatgcaccaccatgtctggctaatttttgtatttttaatagagacagagtttcaccatgttggctaggctggtctcgaacttctgacctcaagtgatctgcctgcctcagcttcccaaagtgctgggattacaggcatgagccactatgcccggcctgatttgagttaaaaatatatgtatcaaatcttacatgttaaatatataccctcagaagcgatgagatatgtccctattttggacttgttgccctggaaactcatttacagagatgttttttgaggttacgtgaataaaaataactcaaagagtttcctcctttttttatctgattcactttcctttcagtcacaccaactttacttaacttttctactctttcacaatatgggttccttgaatttcagagcaatgtctcaccgatttttgcaatcacaatgcctagcacagttattggtaaggagttcatgtttacatgatatctgtcaaatggagtagaaaaatagatgggtggatggttaaatataaaataagatctggaccagaaaaatacaaattgattaatctgatgagaggttttggccaggcatggtgctgcatgcctgtagtttcagctactcaggaagctgaggcgggaggatggcttgaacccaggaggttaaggctgtagtgagctgtgattatgccactgtactccagcctgggtgacagagtgagactctgtttctaaataataataataattaattaagttgttgagctagaaacaaaattcaaggttattgatgttgatattaataacactttatataccagcacagtttaagagctttatatacattacctcatttaatttttccaataactcttttatgtgattagtattatttctcaaatttacaaataaaaacgtaagagcttatggtaagtaggtaattagctcaaagtaatgaatgtagcgacaaggttcaaatgcagggctgtatgaatcagacagctctcccaggcattatgttgtgttgctgtggagtcctaattagggaaaaggagtcaggctggcaagaccaagggaaagcaaaaagaagcagatagaagtctgcctttcttcatggtcccagacacaaagccctcctgtgcaaaacactcacaatcttcctgcactcagctatcaccagaccctcagctgatacaaaaattgcaagttagctcagtgcaaccttggcgttatcaatactgtacaaagccctcctcagcacacagcacaagcactgtcttataaaatccccagcaagcttttgtccttagcaatcaactcctccattgctggcctgcccattgcttccttgcaatgtattttcatactttctccaataaatctgcctttctttacctacaactgtgttggtaaattcttcttatcttccacaccaccagccccagacagtcgccactcacccatgacagttacctctagtcaaaccttctaataatatagttaaacctcaaaggaaccaggaattctctgacataaattcttacttctggaattatgctccccaaccaagaaatattctgtgtctgggggctgcagcctcagaaataaatgaaacccaagagtaagatttattttttcctttgatattttaatttgacttcctttgattgttcattaaaatgagcacatttttgtgctcgatcttttggtgttcgatgtttttatagtaactcttttttccagctttactgaggaataattgactaataaacattgtacttattcaaggtgtataatgatttgatatatgtatacattgtgtagtgatttacttgcattaatttttactaaattttgagtttacctccattgatctaatcttagactttttaaaattctagttcacttagtttttaaatttttattcttaatcattatggatacacaatagctgtacatatttatggggtacacataaattttttttttttttttttttttttgaggcagagtcttgctctgtcgcccaggctggagtgcagtggcgcaatctcggctcactgcaagctccgcctcccgggttcacgccattctcctgcctcagcctcctgagtagctgggactacaggcacccaccaccacgcccagctaactttttgtatttttagtagaaacggggtttcactgtgttagccaggatgttctcgatctcctgacctcgtgatccgcccgcctcagcctcccaaagtgctaggattacaggcgtgagccaccgcgcccagccacatatgaaatttttacacatacaatatatactgatcaaatcaatgtaattggggtatctatcgcttcaagtatttatcatttctttgcgttattaacattccaattccacttttttagttattttgaaatatacgataaattattgttaactatagtcaccctgttgtgctaccaaatactagattttgttccttctaactgtagttttgtagtcattaactatcccttctttatcctccctccctccttactgcccctcctagcttctggtaaccatcattctactctgtttccatgagttcagttttttttagctcccacatacaagtgagaacatgtaatgtgtttttctgtgcctggcttatttcttttgttgttgttgtttgggttttgcttttttttttttgagacggacttttgctcttggcacccaggttagagtgcaatggtgcgatctcggctcactgcaacccccacctcccgggttcaagccattctatctgcctcagcctcccgagtagctgggattacaggcagccaccaccacgtccggctaatttttttatttttcgtagagaccaggtttcatcatattgaccaggctggtcttgaactcctgacctcaggtgatctgcccgcctctgcctcccaaagtgctgggattataggcgtgagccaccaagcccggccgcctagcttatttcatttaacatcatatcctccagctccacccatgttgttgtaaatgataggatctctcattaatttttatgactgaatagtgctccattgtgtatatgtaacacattttctttatccattcatctgttgatgaacacttagttggattccaaatcttagctattgtgaatagtgctgaaacaaacatgagagtgtataaaagacatctcttttatgtatgtatttattaaatatttccacagctttccattcatcttttattatctttattgttttacttgcagctgtttaatatgtttgagtccatcagttatcttctcagttctcttcttttctctttcttccatctggatttctgctcagagggttaatctatctttttttctagaattctgctgctatttgacatttttcctccaacttcattctattatggtggttgatgttaagataggaatttaagttgattttgctccccaattaataaccaattatccaagtaccatttttaacgtccttccttccctcaatcaaaaaattgattttttttctttttccttttcttttttttttttttttttttttttttgaggtggagtttcactcttgtcacccaggctggaatgcaatggcgcaatctcagctcactgcaacttctgcctcccgggttcaagtgattctcctgcctcagcctcccaagtagctgggattacaggcgcccgccaccacactcagctaattgttgtatttttagtaaagacggggtttcaccatgttggccaggctggtctctaactcctgacctcgggtgatccacccgcctcagcctcccaaaaagtgctgggattataggcgagagccaccacggccggccccctcattgattttaatgtcacttctataatatagtagcttattttactgaatttgtttttcattatccagcagcattggtatacagtcatgccccacatgatgatgttttggcctaagacagaccacatatattatggtaaacccataagattataatggagctgaaaattttcttttctttttttttttttcttttttcgagacagagtcttgctctgtcgcccaggctggagtgcagtggcacaatctcagctcactgcaacctccgcctcctgggttcaagcaattgtctttcctcagcctccggaatagctgggattacagatgcccaccaccatgcttggctaatttttgtattctgagtagagacgaggtttcaccgtgttggccaggctgctctccaactcttgacctcatgatccacctgccttggcctcccaaagtgctgggattacaggtgtgagccactgcgcctggcccggagctgaaaattttctacagcctaatgacttcatagtcactgtacttcagaatgcaacacattactcacacgtttgtgtcaacaaatctactgttccacctgctgtataaaaggcaagcacatacaattatgtatatagtgcagaatacttgacaatgaaaataaacgactatgttactgatgtgtgtacttactatattatacttttttatcactattttaaaggttactccttctacttattaaaagaaaaagttaaccataaaacagcctcaagcatgtccttcagaagatattctaaaagaaggcattgttaatacaggagatggcaactccgtgcgtggtattgcccctgaagaccttccagtgggacaagatgtgaaggtagaagacagtaatactgatgatcctgaccctgtgtaggcctaggataatgcgtatgttacaaattttttaaacagaaaaaaaaaaccatatagaataagaatataaagaaaaaacatttttgtacagctgtacaatttatttaagctacccgttattacaaaacagtccaaaagtggttttttattgttgttgttgttctgtttgatttatttatctttttttttgagatggggtctggctctgtagctcaggcaggagtgcagtggcgcaatctcagcccactgcaacctccacctcctgggttcaagcgattcttcctgtctcagcctcctgagtagctgggattacaggtggccaccaccacacccggctcatttttgtattttcagtagagacagggtttcaccatgttggccaggctggtctcgaactcctgacctcaggtgatccgcccgtaatcccagcactttgggaggccagggctgcggatcacttgaggtcaggagtttgagaccagcctgaccaacatggcaaaactcccgtctctactacaaatacaaaaattagccaggcgtggtggtgggcacctataatctcagctactctggagactgaggcaggagaattgcttgaacctgagaggtgaaggttgcagtgagccgagatcttgccactgtactcaagcctgggtgacagaaagagactctgtctgaaaaaaaaaaaatatatatatatatatatatatacatatatatatatatatatatacacgtgtgtgtatatatatatacacgtgtgtatatatatacgtgtatatatagtgtatatatatatgtgtgtgtgtatatatacgtgtgtatatatatacgtgtatatatatacttgtgtgtgtgtgtgtgtgtgtgtatatatatatatatatctcattactgggagatataattgctttctactgaactgaaaacggccctgcgaggggcatttctactgaactgaaaactcacatctggtctctcctggactctgtcccatgcacctttgcttttgctgattttaatctttacccttcactgtaataaaccataactgtgagtatgatagcttttctgagttctacgagtctttttattttattttattattattattattttttgagactggtttcaaactcctggactcaagcaatcctcctgccttggcctctgaaagtgctgggattgtaggtgtgaatcaccacgcctgtcttgaattctatgagtctttccttttttttgaaacagagtctcactctgttaccaggctggagtgcagtggcgccaatctcagctcactgcaacctccgcctcccgggttcaagtgattctcctgcctcagcctcctgagtagctgagactacaggcgcctgccaccacgcctggctaattttttgtattttagtagagactgggtttccccatgttggccaggctggtctcgatctcctgacctcatgatctgcccgcctcagccttccaaagtgctgggattacaggcgggagccaccacgcccaaccctgaattctatgggcctttctagtgaattgctgaacctaaaggtggtcttgggggacccctgacacagagaccatggatattgttttatcaggagaaataatggtttttctttaccttcttcttccgccactctttgagaatgtgagaaacatgagttgaccactcttcttgttgaagctgaagcttcccttctccccaaacctaggagaaacgtttcttcccctcccttgctcacgccgtccttcaagccctcagcatatgctcagagagaaacagagaccttatatacctttcattcctgctcctttatttcacttttccctcccccctaaatgagtcaagcagaacgtgtgttcagcccacggtcagttgggcaacagatgtgtcaccaggactcccctccccagcccccttccctcctctctgggggggcagagctggaggcccctcacatagcactctcgttgcctccccgtccccgggatgcccccttctcctgtgccatgagggacttgtagggtttccccaggctggggagggtaagctcagcttcctgaagctccagctcccgctgagacaagtgctcgatgacggccgctccaattgagtcccccagtacgttggtcattgtgcgaagccggtcactggtacaggggagaaagaagctgccattaatgggggcttgaaaagcttcacagaaagagggtgcagcagaggggggtccctgtgccagggagtcagagggctcccattgcagtacaatccatgaccacatgtccccaagcaggttcttccccctctctgccctgtttctcctactaacaaacaggatggaccaggtctgagatgttcatgtttgatcttagatgtgatattttttaaaaaatgaggctgggtgtggtttacagaaaaaagatcatatcattaaaaagatatgatcccagcactttgggaggctgacaggcagaagaattgcttgagaccaggagttcaagaccagcctgggcaacatagcaagaccccgtctctacatagaataactttaaaacacagcctgggatggtagcatgtgcctgtagtcccagctacttgggaggctgagatggcagggtcacttgagcccagaacgtcaaggctgcagtgagctatgatcatgccactccactccagcctagatgacagaacaagaccctgtctctcaaaaaaaaagaaaatgaggcagggcgtggtggctcatgcttataatcccagcacaaggcgggcggatcacaaggtcaggagttggagaccggcctgaccaacatagtgaaaccctgtctctactaaaaatacaaaaaaaaaaaaaaaaaaaaaattagctgggcatggtggcatgcccagtagtaatcccagctactcgggaggctgaggcaggagaatcacttgaacctgggaggcagaggttgcagtgagctgagatcgagccactgcactccagcttgggtgacagagcaagactctgtctcacaaaaaaaaaaaaaaaaaaaaaaaaagaaagaaaagaaaaaaatgaacatctcatgcagacgattaagggttatgaactgaaaagcacatagaatccggaatggtaaaccagggcaggcctgagtcaatacaggtgtagactagggcaggctgaagattataaaattggaactcaggctcagctgacagctcccatgtgggaatgaaagtccaggcttcctttaatgtaaacctcctggttttgttgttgttgctggtttttgtttttgtttttgttttttgagatggtgtttcactcctgttgcccaggctggagtgcagtggtgcgatctcggctcactgcaacctccacctcccaggttcaagcgattctcctgtctcagcctcctgagtagctgagattataggcgcccaccactaggcccggctaatttttgatatttttagtagagatggggtttcaccatgttggccaggctggtcttgaactcctgacctcaggtgatctgcccacctcggcctcccaaagtgctgggattacaggcgtgagccaccacacccggcctgtttttgtgtttttgaaacagagtgttgctctgtcacacaggctggagtacagtcatgtgatcttgactcactgcagcctcaacctcccaggttcaagagttcctcccacctcagcctcccaagcagctgggactacaggtgcgccaccacacccagctaatttttgtattttttgtagagatgggacttgccatgttgcccaggctggtcttgaactcctgaactcaagcaatccacctgctttggcctcgcaaagtgctggaattacaggcacatgtcactgtgtcctacccgtaaacctcctgtttttaaaaattgagatttaaatatatatttgcagctgggagtagcagctcacatctgtagtcccaactacttgggaggctgaagcaagaggattgcttaagctaaggagttcaaggccagcctgggcaacacagcaaaacataatctcaaaaaaaaaaaaaataacaaatcccagcactttgggaggctgaggcaggtggatcacgaggtcaggagatcgagaccatcctggctaacatggtgaaaccccatctctactgaaaatacaaaaaaccaaaaaattagccaggcatggtggcgggcgcctgtaatcccagctacttgggaggctgaggcaggagaatggcgtgaacccaggaggcaatctcatctcactgctacctccacctcccaggttcaagcgattctcccacctcagcctcctgagcagctgggattacaggcacgtgccaccacgcccagctaattttgttttttgtttgtttgtatttttagtagagacaccgcacccggcctggatcaccttttggtgacttctacataaaacaggtaaaagaggagtttttctgcctgataggtaaagcccccattgcttgtctccaaccctacttcccaaagataactgtgggatttggggtccagaggccatggattggaggcctctccaaggcctccttttcacttgaaaattctggaccactgcatctttgctggaataaaagtccacaggtcgaggacgttgcaggggaaagcagtgtgtgcagaagcaggagcaccagggtccagcctagagaacactcacaggaaccagtccacggcaatgatgagcgtgatgtcttccgtgggcaagccgaccgacgtaagcacaatgaccatggtgaccagacccgcctgggggatgccagcagccccaacactggctgctgtggccgtgatgctgcagggggagggagaacatggggagcagatggagggaagaaggcgatgaggaagagagaggaaaaggacagagagaagggaagagatcagctccccaaggcattttaaattaaatacccaagccagacacagagagaaaaatactgcttgatgcctcgcctcgcctcgcctcacctcgatccccacccaccccgcccctcccctcctcgcctcaccttgcccctgcctcgcctcctctctctctctcccaggctgaagtgcagtggtgttatctcagctcactgcaactcactactcaatcccaccttaacctcctgagtagctgggaccacaggcacatgccacaacgcctggttaatttttagtagagatggggtttcaccatgttggccaggctggtctcgaactcctgaccacctcgaactcctgatccacccacctcggcctcccaaagtgccagaattacaggtgtgagccaccgcgcctgacagagcttacattctagtatgggaagcaggcaataaacaaaatgaataactaaaattcatactatatggagatagtactacacggggaaacagtgcctccttagcaagacccgatatgccattttaaacagggcttccctgaaaaagtaacgctgaagacctgaaggagatgacaatgttcactgttatttttataatgactaagttggaaccactggatgatgggacctataaatacaggaataaataaatgtatagagcctacaaatataagaatctatatacaagaacctcgggttatcaggatgcaccagccatgctttggaaaacactggacaaatggatctcccacgtgagagggaaactgacaggaacgtcttggcagctcctgacagcctcaggtggcaactttacctttcacctacctcatccggcattgggctcttcccacatcccgcttccaacatccgtgggctcctctgagctccagctgaggccccctcctccctccccaaccctcccagccaagctgatgaccgcttaagtctcacctgctggcaggtcctacccaagccccctcacctgatggttgtgatctgacccaggttgagctcgtagttgttaacttgagcaatgaagatggcagccagggcctcgtagagggcagtgccatccatgttgaccgtggcgcccacgggcaggacgaacctggtgatgcggcggtccacacccaggccctcctccaggcagcggaaggtgatgggcagcgttgccgagctgggggaaagagcccaggactgaggatggggcgtggcctggtgggggcggggctgggaacagggtgtggcctagtggggcagggcagagaatggggcgtggccgaagaaaggctggggaacagggcgtgacctagtggggtacggctgagaatgggtagggctgggtcacatgggcggggctgagaacaggggaggagtaggtgaggcggggctcagagcaggacgtggccaggtgaggaagagctgagaatagggcgtggcaaggcagggcggggctcagagcagggcatgggctgggcgtggcctgggcagaaatgagcccaaggagcgttccccttgagaacattgagcaggccaggtggggggctcctcaagatgcagaagacaagggtataacatttcagaggctgataactgtacaaaggaaaggagcaactcctcatgatacaggaagaaaacagcaatgagggtctcccaagctgaagatctcttcacccacttaaagccaatagctaaggccaatgactacacactagtttatggcagtagttcgttctacctatccatttccaaaaaggacaggaccaaaggtctgctgacttcagggagggcccctactccagactcccctgtttgcaccagcattgacctcagctgtgctaactttctctatccatctacccgccatgtcttatcggagaaaagtgacctaattgattggcgagtttagtcaaagaagtgggcatctcatttggggtaagtctgtccacaaggcgtgtgttctgtggtcagctttacatcatacggttggaatcctggactcataagagagtctctgggtgtccagctcagcggtgactatgtgagtttaattctaggatacagtgacatcagtcttacctagccatagaccaagaggcacattccctgaccagcgttatgggcaattttaaaaattatatttttgatcaggtgcagtggttcgtgcctgtaatcacagcactttgggagagcgagacgggcagatcacttgagctcaggagttcaagacaagccatagccaacatggcaaaaccccgtctctaccaaaaacaacaacaacaacaaaaaaaacttagccgggagggctaaaaaattagccgggaggactggaatcaggcacctgtgattccagctacttgggaggctgaggtgggaggatcacttgagcctgggaagtggaggttgcagtgagtggagatcacaccactgcactctagcctgggtgatagagtgaggcctcatgtcaaacgaaaaagaaaaagaaaaaaaagatatttttggccgggcgtggcggcttacacatgtaatcccagcactttgagaggccaaggtgggcagatcacatgaggccaggtgttcgagaccagcctggctaacatggcaaaaccccatctctactaaaaatacaaaaattagccaggtgtggtggtgcatgcctgtagtcccagctacttgggaggctgaggcaggagaatcacttgaacctaagaggcggagcttgcagtgagccaggattacaccactgcactccagcctgggtgacagagtgagactctgtctcaaaaaaaagaaaaaaaaaattcttccatctttttggctgttgtgctacttttcaaatttgtttttgaattgggatgatgctcttaattaatcccctaaaactacaaaagaagaagaggaggaggaagaggaggaagaagaaaaaggaggaagaggatgaaggggaagaagaaggaggaggagaaggaagaagcagcagccaagagatctcccagacaccatctcacaagtggagatgacaccctctgagctaggaaatgactgagctcatggggcatcctggaaccttccctcttaacctcaaaactggtacctggttctcctccacagaaagttaaaaaacaggaaaggagaaaaggagaccaggagagccagcccaggacaatgactggaccccaggtgttgacattatgagccctggacattgttggacgactcagaagaggtgtttaaggaatggagagggcaggtgccttaggagaggacatgaaggacaagaagtgcaaccaggaatggtgctggggtggggagcaaggccatacctggaagacgtgcccatagcggtgatgagggcttgtagcatgcccccaatgaaggggaaggggttccggtgagtgacgaggaagtagatgaggggaaggacaatgccggcatggaggaacaggcccacgatgacggtcagggtgtacatgcccagctgaccccccaggacggccatgtcttccatctccagaatcttcccagcaatcaggaacaggatgcccacaggtgcatacctgtgtgagggagccacatacctgtcagggctccctcctgacctcccttgcaggtctgaaggtggcatccccaaggctttgcccatatagggccctggagccacacaatacccatgatacggcaccctactccatcccagtcttccccgtacactaatgaatgccaccgggccccatgaatgaagcccacctcctcctcctcctgctcttccacatctccccaccatggtagaaaagttcctacaactccaggatatacaagctttcaggtctctcctgtacctactccccattcaagctctctcaatcctgccccaaataatcactaccttcagtttccttccttagacattgccaagacattccctgtctctggccttctaagcttcccttatcttctgcccccaactgtttgttccacatttgaaatgtgtatgcccctattctcttccctatcagtgcctgttatcactcattcaccagcctaagcatttccctctcaaaccacttgtcctatcaaaatcaccgatgtattcattcattccacagatattgactgagtacctactgagtaccaggcacatggctctcgtcctcaaagcacttacattctgttatggactaaatgtttatgtcccctccccactccaaccaaattcatatcttgagatcctaacccccaatgggatagtattgggaggtgattaggtcatgagggtagagccatcatgaatggaattagtgcccatataaaagacacaccagagagctccctccacccttctgtcattcgaagacacagcaagaagacgccttccatgaaccagaagacagccctcaccagacatggaatctgtgggtgccttgaacttagacttcccaccctccagagctgtgcgaaatacatttttgttctttaagccacaatgtctatggtatttttgttacagcagctgacatgaactaagacacattctaatggggaaagcaggaggtacacatagaaatgcactaattgcaaacttcaagtggtgataacagcaaaggagagtcactggatgggactgcttctgagcagatggtcagagagggcttttctgaagaggtgacatttaagctgagacttgcatgatgagaaggtaccctgtgtatctggaagaaatcattgcaggcacaatgcagactctgagatgggcatgcactaggagtgctggaggaccagagagaagaccaatgtggctggagtattgagtaaaaaggagaatagagaagatgaaagaagcaagttcatcaggggctcacctgtttccccccataatccagcccacgggtcaatcgagtgagtttctgccattggcaccatcatctcatttcgaggcttcaatggctactcctctttctttagaaattgaagtttatggctgggcatggtggctcatgcctgtaatcccagcactttgggaggccgaggagggcagatcacttgaggtcaggagttcgagaccagcctggccaacatggtgaaatcccatctctattaaaaataaaaaaattagtcaggtgtggtagtgcacacctgtagtcccagctactcgggaggctgaggcagaagaatcacttgaacccaggaggcagaggttgcagtgagctgagatcacatcactgcactccagcttgggcgacagagccagactgcatctcaaaaaaaaaaaaaaatttgaaatctactttggctcacattcatcgtggatgtgttggaggaggtggggacctcttgggaaggtggtacaatagcttgagtcaaaaatgaggatgcacggggcttctccagtcacatctgtgttctccaaactgggctcagagttagccctggggagtagttgctgagtcttctccaagtcaacatgactagatccacctctatgcttactctgagtaatccctctctcaacttcctcacctccatccttccacctcatcccctgcaaaattcctcagcccaagattaattgtgcatgatttcttaccccctacactcagccacctggcacatctggacatttcacccaatcatgccaatgacactgctataaattcattgttcccaattcagctgagccttcattattccttgttaactctctgcttatccttaataagctccccactcccattcctttcagatgcttttccaggccctcaacttggcctcaagttccttatatgaagaaagtaaaagttcgtcttcaaagtttcccttcttgttaaagaataaatcttaagtgttaaaaatagtttcttttaaagactaacttccttcaagcctccttactttatgctaataactctttgttaagccctatcctatgtaggtgttagacacgctcacaggcacatagtacattctacgtccttgtactttaaccaagatatctgtgctggatgtgctcacaggcatgtcccagcttgcagcctataccccttccttatttgggaatgttattacttttctaagtccttttgtaagcaacttcctcttttcctctgttttccattgcttttacctatttagaaaagttttaaattattagccagtcgggatttagtttagattgtaaagtctggctccagccaatggagacagacacagtagcagggacaaactgcataagggataaaaattgcttcttccctcctttgttcaggtgtgctcttgccattgttccatctgtgatgaacaccctttctgcagaagtaaaaattgccttgctgagataattaaatttatgtttgagtgctatttctttatggcactggggaacaagcattctgtttctaaataaacattttacatatgacactatacaactttccaattgtttgggatgatgtacaaagtcttctcccatttgggatctgacagccttgttaatatcttccaccaccactcccaacttaccccatgctctcaccttcctgaatgccccaccattctccaaacaacttaggtaccttcaagctttgcatgttctcttctctctgcctgaaatacgtctcccctctcactgtccagttgaagtcctactcacctgtcaagacgcagttaacaggtgaccttcttcatgactccctcttcaggaagcattcactgcgtacccctctactcactgcttccttctccaagttcccaacattttttaaatgttcctttactacagaacctaccaccttgtgttatattgatctacaatgtgtctgtctcccctaagattttgtgagcttgttgaggacaaggtatgagtgcactgtatctctgtactccagaggtcaagacaaagtctgcctgggaaaatgcctgctgagtgaataaagatatttctgaagtaataaaggaatctagagaaggaatgatggaaggaaggaaggaaggaagggattaacaactggatgaataagtaaggaaataagcaaatgaaacaagttagtagctgagtgaacaaatacgtgaacaaatgagtgaatgaagagaatacttgaataaatgaatgaaagaataacaaatgcatagatgaatgagtgagtccaagaatgaattagaatgaataaatgacttaactgagtaaataaacagatgaatccatcaatgatttaactaatgcatggatgagtttgtaaataaatttacgagtgaatgaatacatgagtgagttaactgatgcatggaagaatgaatagatgaataagaaaatgaatgaaccgatagaaaaatgagaatgaataagtgaataaattggtgaatgaagagatacatggggaagtaaatgggtgaataaatcactgcagaaaggtatgaatgaatgaatagtaactaaccaatgcataggagatgaataaatccctgtcacttgtgacaacacagatgaacctggaggacattatgctaattgaaataaccaagacacagaaagacaaataccacatgatctcacttatctgtggaatctaaacaatcaaactcacagaagcagggagtaaaatggtggttaccagggactcgcaggaaagggagattggggagatgttgatcaagggtacaaaatttcagttaaataggagaaataagttcaagagatctattggacaacatggtaggtatagttaaaaacaatgtattgtgtacttgcaaatcacaaagagagtagattttaagtggtctctccctttttttttttttttgagactgggtctcattctgtcacccaggcaaccacaactcactgcagcctctacatcccaggctcaatctgtcctcccgcctcagcctcccaagcagctgggactacagctgcatgccaccacacccagctaattttttttgtattttttgtggtcttgtcatgttgcccaggctggtctcaaattcctgggctcaagtgattctcccaccttggcctcccaaagtgctgagattataggcatgagccaccacaccctgcctagatcttaagtgttctcaccacaaaaaaataagcatgtgaggtaacgtctatgttagttagctcaactgaaccattccacaatgtagagatatttcaaaacattatgttgcacatgaaaatatatacagtttttatttgtcaattaaaaatacattaattttgcaaaataaataaatgaatgaccaaataaatccagaaaccaatgcatgaaagaataaatgtagctgaataaatgtcagtgaatggcttggtcaatgtattgaagaatgagtgaatgaacagataagcaagggagtgaacaagtgaacaaatcattgcagaaaagtgtgaatgaatgaatgagttagtgagttggccagtgatttaaccaatgcatagatgaatgaataaatgcatgaggaaatgagtaaatcaatgcattgaagcatgagtatagatgaataaatcactgaatgagtgatttcatcaatgcatagaagaatgagtgaatgaacagatgaacaaagcagtgaatgaatcattgcagaaggacatgaatgaatgaaagagtgagatattccatgaactaaccaatgcatagaagaatgaatgaatgaacagatgaacaaggaagtcaactagtgatgaaatcatcccagaaagacatgaatgaatgagttggtgagtgggtaagtgaatcacccaatacgtaaatgaatgaccaaaagtccccagcaagcccttcggcagcttccccacagcctgacttcccagctctggctccaccatcccgtgggcacagaccaggactcaccagataatgatgcccaccagcctcataatagcctcattgaggctgtcgaagaagtccctgaggactctgcccttgtgtttcatgccaccaatgaccagcccaaaggccacagagaagaccacgaggcccagggcgttgatgccattggcggagccaggcacgggtacagtctcctcaaagctcagcatctcctgcagggtacccaaggcccgagtgacattttccaggaagctggttccgttctccactgagaatggaggaggcatggaggcacccggctcagacccgttctctgtcctcaccatggtcctggttaccaccctcgtgctgtactgcgtcttgaactgaaatagagagagattgcgcccagattcaattcagcggatgcattagaatcgcctggagaaattccttgagaccactgattcccagttcccacaccctggaagatcgataagatcttcattatcgattatcactcattatcgactatcactcattcagcagatctgaatgagtgaatgaatgacttgaatagtgcatggaagaatgagcgaatgaatcagtaaacccattatgaaaaatcatatggagcttcctcaaaaaattaaaaatagaactaccggccgggcatggctcacgcctgtaatcccagcactttggaaggtcgaggcaggcggatcatgaggtcaggagtttgagaccatcctggccaacatggtgaaaccctgtctctactaaaaatacaaaaattagctgggtgtggcagtgcgtgcctgtagtcccagccacttgggaggctgaggcaggagaatcgcttgaacctgggaggcggaggttgcagtgagctgagatggtgccactgcactccaacctggcgacagagtgagactccatctcaaaaaaacaaaaaaaaattgaactaccataggaccagcaatcccactactgtatatatccaaaggaaatgaaatcagtatctcaaagagatatctgctctcccatgtttattgcagtactattcacaatagccaagatatgaaatcaacctaagtatccatcagtgaatgaatggatacagaacatgtggtatacatatacaatgaaatactattcagccttgaaaaaggaggggatcctgtcatttgtgacaagagggttgaacctggaaaacactgtgctacgtgaaataaaccaggcacagaaagacaaatattgcatgctctcacttatatgtgaaatttaaaagagttggactcatagaagcagaaaatagaatagtgcttaccagggactggggagcagggaaattggggagatgttggtaaaaggacacaaaatttcagctagacaagagcaataagttcaagagctctattatacaacatggtgactatagctaataacaatgtattgtgtatttgaaaatcaccagaagggtagattttaagtgtctttatctcaaaaaatgttaagtatataaggtaattgatatgttaataagcttgattgagccactccacaatgcagacatatttcaaaacatcatcatacctcataaatacatataatctttgtgtgaatttgaacataaataaattaaaaatattttttgaagaataagtgcctgaataaatgaatgaggaagtgaacaaccaatgtgtggaagtagtatagattctgaatttttcacaagctccctgagcaatgcttaaccagagttgagggcctctcccctcaaccatctgtggtcaaaatttctggaatctctacaccagccttgttgcctcctctagccctgtgctcaggaagtccttggcctaagtcctcttttttttttttttctttttttgatatggggtcttgctctgtcacccatgttggagtgcagtggtgtgaccactggagccttgatctcctgggttcaagcaatcctcccacctcagcctcccaagtagctgagacaggcgtgtccagctaatttttttttaatctttttttttttttgaaagacagagagtctcattctgttgcccaggctggtcttgaacttttggcctcaagtgatcctcccaccttggcctccctaagtgctgggattacaagcctgatccaccattctcggacctaagtgcttctccctaacccccccagatcaccatggaaaatacatcctttctcctagactcctcaagaacccctgcccattgctctgtcaggcccttcctcccgcctcttgcccttggaccatcccttcagccccaagctcccaccaccctccgaatctccttgatcaaactgtgtacttccccctgacctgtttgaagcaggcctccacaaggtttggtggaaacatatttctgcagaaaaacatgagaagaaggaaagtggttagaccatggaagggcatctagggtgataacagtaatactaacaccaagaacaacaatagtgcagccaacatatgaatgcttcctctaggctgggcactgagcaagcatcttactatcatctgattaaaacactacaataaccctagacatgagtcctattgaatgccgcctttcacatagaaagaaaccacagcccagagaattgatgtaagctacccggagccacagagctgctaagaggtgcagatggccctcaaatccaggtctgtctgagcatgtggccagagccctacatcacctcaaggactttaattcaaacacacatgtgtcagtgatgcctcaaaaaaccacagaaaactcttaaacccttttaactttaggtttcgtctaggcccatgattaaggtagaaccatggctagccttgattctgtgtggcaaaaatcttgctgctttaattaaaattaaaaccacaatgagataaccaccttaaccccagctagaacagccatcattaaagagtcaaaaaactatagatgttggcattgatgtgggggaaaggggacacttacacactgctggtggggatgtaaattagtacaacctctatggaaaacagtatggagatttctttttttttttttttagatggagtcttgctctgtcgcccaggctggagtgcagtggtgcgatctcggctcactgcaacctccacctcccgggttcaagcaattctcctgcctcagcctcccaagtagctgggattaaagttgcccaccaccacgcctggctaattttttgtatttttagtagagacagggtttcaccatgttaggcaggatggtctcaatctcctgacctcatgatctgcctgcctcagcctcccaaagtactgggactacaggcgtgagccactgcgcctggctgagagatttcttaaagaactaaaagtagatctaccattccacctagcaatcccactactgggtatctactcaaaggaaaagaagtcactatatcaaaaagacacctgcacacatatgtttatcacagtacaattcacagttgcaaagaaatggaaccaacctaagtgcccatcaactgatgagtgcataaagaacacatgatatatgtacaccatggaatactactcagccatgaaaaagaatgaaataggctgggtgcagtggcttacacctgtaatcccagcactttggaaggctgagatgagtggatcactcgaggccaggagtttgagaccagcctggccaacatgatgaaacgctgtctctactaaaaatacaaaaattagctgggcatggtggcaggcacctctaatcccagctactcaggaggctgacacaggagaatcgcttgaacccgaaaggcagaggttgcagtgagctgagatcatgccactgcactccagcctgggcgacagagtgagactctgtttcaaaaaaaaaaaaaaaaagaaagaaataatgtctttggcatggttggagctgggggccattattctaagtgaagtaattcaggaatggaaaaccacatacagtatttctcacttataagtgggaactaagctatgagtatgcagaaacatacagagtgatataatggactttagaaactcagaagcgggaggcggggagagtagttagaaattaaaagctgcacattaggtacaatgtacactactagtgggacggatgcactaaaatctcagaattctccactatataattcatccatgtaacaaagaaacacttgctccccaaaagctattgaaattaaaaattaaaaaatttttcataggccgggcacagtggctcacgtctgtaatctcagcagtttaagaggctgaggcaggtagattacttgaggtcagcagttcaagaccagcctggccaacacggtgaaaccctgtctccactaaaaatacaaaaattagtccagtgtggtggcgtgcacctgtaattccagctactctggaggctgaggcacaacagaaccctggaggcggaggttgcagtgagccaagctcatgccactgcactccagcctgggcaatggagtgcaaaaataaaaataaaaacaattaaaagagtaaaggcaactattaatagcaaaaatattttttaataataaaaataaaaaatcaaaaatttagttaattttttaaaaaatcgtgctgcttctatttacaatagcaaagacttggaactgacccaaatgcccatcagtgatagactggataaagaaaatatggcacatatatgccatgcaaatactatgcagccataaaaaagaatgagttcatgtcctttgcagggacgtggatgaagctggaagccatcattctcagcaaactgacatagaaacagaaaactaaacactgcatgttctcactcataagtgggagttgaacaatgagaatacatggacacagggaagggaacatcacaccctggggccttttgggggctgtgggggcaaagggagggggagcattaggacaaatacctaatgcatgcggggcttaaaacctagatgacgggttgataggtgctgcaaaccaccatggcgcatgtatacttatgtaagaaacctgcacgttctgcacatgtatcccagaacttaaagtaaaaaataaaataaaatataaattaaaaaatcatgctgctctaagagaatcattcaccctccaatgatgcttaggcaaataccagctgttctgaccccaccttaagggtcatatcctaagatcatattctagcagcagctgctgttggagaatatatacaaggctccagggcagaaattgggtaccacaagtggatactatgggtgctgctatgtccaggctgcgggagcctgtcccctttgtctctccttcagtatgagttgttgcaagtagagtcagaaatcatatcaaaatgagtacagtcacctgtaaactaaaagtaacacctaagccaccaccaccaccaacagctgaacagactctcttgtggccaagtggaccccagaacaactttaaaactgagttcctggccatgatgggacaggaggtcagacacgcctccttacactctctcccttttataatctagacacaacaactaacccacattaatgttattaatgcattaaattaaaacagaaatcataagactgatagaacaggctctttggggcaataagataccaaattataaggaggatctaagaccatgccacgcaggggttaagtcatggaccctacgctcaaagaataaattgtgttctagctgtcaaaaggttcttctttttctctaggagttaaacaaacactagtcttatgataagcaatattaaaataattacaactcatcagctcacagacaaggactaatggggcccctgttccaccagccataactacagctttgattggacaagagactgatttcagtaactttctcctgataacaccactgaccatgggctggttctggctcattgacagaggctgtgcatttgggtaccttcgtgtcctgaaaagaccttttgatgtataaagcctaaatgtgatacatttaaatgttaagtaaatgttaagtatccaccccaaagtggacatggggtcatatgttacatgcaactttcttcaatatgcatgcatcagggccacctacatgaatattcatagctcctcctgtaacctgttgaatatgcatgtttagccaacccattcagcataaagctcctactccaacccctcctccttagaagtgcccgtctctgctcttgaccggacgcatgcttcccagcctgtgggatgacctctttgcaggctataatcttttacaataaataaagtctcctttttcaaatgtgtatattgtggttttttaggttggcacacctgatcaggtccatgaaggcatcagctgtggggatggtctcgatccggccctcccggtgcagcccctccttggagcccttcccgggatggatgatggtgaccatgaggatgccgatgaagaccgcgatgatggtggtcaccatgtagtacacagctgcccgcatccccatccgccccgtggccttgttgtccagggatgccatacctgaaggacagatgatgtggcccccgcagctccatgcatacccaacgccagctctcctagcatccgttccaccctccccatatcaccaactcaacagccgacccaccaagcatcccttttcctatagcccaccccaaaacccacccattacccattcacccgcaccaccatctttctacttctaattttccaaatacacaccctcacacgccatcccaacccttatcccaagcagcactccactatcctactgccttccctctactccaagccaccttttccacactttcaccccatcctctattgagtcttgttttctcttgttttgcaccataacctaactattttttttttgagacggactctccttcgcccagactggagtgcaatggtgcgatctcagctcagtacaacctccatctccccagttcaaacaattctgctgcctcagccttccgagtggctgggattacaggcacctgccaccatgcccagctaatttttgtatttttagtagagacggggtttcaccatgttggccaggctggtctcgaactcctgaactcagacgatccactcacctcagccttccaaagtgctgggattacaggcatgagccactgcgcctggcccataacctaactttcattccacttgtcatcccactattaatcccaaaatcacaccttcctccaacccacctcacggcgcaccctttgtggcacatattcttggtgctccactcctacaccctttcccaagccaatctgctgatccttcagccccgagagcactgagtacaatagctcaggctgcccacttctcctgagaattgccctcagcaaaatgggagctgccttgcccatagaaaccccaggggagacctagagccaaagaatgactgtgcagggattcacaatggccaactcctttgattcaggtggcagtagagctggggagggattcaattctgtggttctgctcacactccagagctccccatgagatgaggctgagaggccagccttcttttgaaacccacatctttgcttcactggtttcccagccctgtcccacttccttcacttccttgcgagtttctcttgagagctatcccgcaataaatcacctgtgcagatatccccatctcagtcaggctctgcttctaggaaacccaacctaagaagccatttcttcatgcctttttcttcttccccatccccaaatccagggattggcaaactgctactcatgccaaatccggccctctgcctgcttttgtaaataaagttttattggaacacaaccatgcccatttgttctcatattgtctatggctgcttctgtgctgcaatggcagaatcgagtacaattgacccttgaacagcatgggtttcaactgctcgagtacacttatgcatggagtttcttctgcctgtgccacccctgagacagcaagacaagccctcctcttcttcttcctcagcctactcaacatgaagacaaaggggatgaagatctttatgatgatccacttccactcaattaatagtagataacatttctcttccttatcatttttttaatagacagggtctcaccctgttgctcaggctagagtgcagtggtgccatcacagctcgctgcagcctcctgggttcaagtgatcctcctgcttcagcctctcgagtagctaggactatgggcatgtatcaccatatcctgctgattttttttattttatatagagatggagtctcactgtgttgcccaggctgatctcgaactcctgggctcaagcaattctcctgcctcaacctcccaaagcactgtgattacaggcataagtcacctcacctggcctgattttcttaataacattctattctctagcttactgtactttaagaatatagtataatggccgggcggggtggctcacacctgtaatcccagcactttgggaggccaaggcgggcggatcacgaggtcaggagatcgagaccatcctggctagcacggtgaaaccctgtctctactaaaaatacaaaaaattagccgggcatggtggcgggtgcctgtagttccagctactcaggaggctgaggcaggagaatggcatgaacccaggaggcggtgcttgcagtgagcggagattgtgccactgcactccagcctgggcaacggagcgacactctgtctcaaaaaaaaaaagaatatagtatataatacttacagcatacaaaatatgagttagtcaactgtttatgctctctgtaaggcttccagtcaatagtaggctattagtagttaagcttttcgggagtcaaaagttacatgtgagccgggcgtggtggctcatgcctgctatcccagcactttgggaggccgaggtgcgcagatcatgaggtcaggaaatcgatatcatcctgaccaatatggtgaaaccccaactctactaaaatacaaaaaattagctgggcgtgttggtgcgtgcctgtagtcccagctactcgggaggctgaagtggaggaattgcttgaacctgggaggtggagattgcagtgagccaagatggtgccactgcaccccagcctggtaacagagcaagattttgttaaaaacaaaagaaaacaaaacagttatatgtggattttttactgtgtgggggttggtgcccctaacacccaaattgttcaagggtcaaccctagttgcaaaagagaccatatggcccttgaagctgaaaatgtttactatccagccctctaaagcaaaagtttgtggacccctgcataagccaaccatactcccatcccaccctctacccactaagctgtcacctccatctcactcaccttccacaccttaatcgacaccccactccctgcacatccataccatagcccagccaccctccctggttgcccttccaagactttctctcacttctttgtgatactaagccccttgcaggctggcattttacctccaaggaaaaggacaggaagcctactgagatgagtggtgtggggtcatatggggtctggaacctgggaccgattgggacctgggctttgtttggccaaggacgctggaccagacacaggctccatgtttgaggtgccgcgtcaaggaagtggtcccatgcttgggatggccttggctctgggttcaagctgaggctctagacgggtcttggaggccaacactggcctgggctctctcacctgtgaccaggctggagacaatgagaggtaacaccagcatctgcagcatcctcatcagaagctctccaggaaaagagaagtacttgatctggcggtaggtgagctgatatgggcgcagggcaaaggccaggctgacccctagggccaaaagaaggggtccatggactgaagtctgggtcgctcagccccaggcagggtccatccatcccaagaagggtagggcaagggtgggagtgagggagagaaatatcctatgagtgtgtgtatttgtgtgtgcactgatgtgtgcagacattgtagaaatgtatgcatgtatgggttaccatattgatattgtgtaaatgtgtgtccgtgtctgtgcaaatgtaaatgtgtaaatgtgtgtgtatatatccaggatatgtgacggtagacattcacttgtgaacaggtataggtgtctgtatacaggggcatatacacatgaatctgcacaggtgttttcctggacatctataggtgtgatttgtgtgtatcttactattttcaaacatgggagtgtacgtgttcttaagctcataagtgtgtgcacgtgtactcaagagaatgcatgtagagatgtgaatgtgtttataagttccaacatacatgcacaagtgtgcatgtttgtgtttgcacctataagttcaatgcacgcatatgtgtgtgtgcatagtaaagtgtttgtacattgtatatgtatatatgtgagtgtgtgtgtacacatggatatgcatgtaacattgtgtgcacacacagttgtgtttgcacacatgtgtattcatctgtgtggtgtgtctttatgtggggggttgagggtgactggtgggactgggacgtgtgtgcaggtgagaatgaaggggtgcagcaaagagatgtgtagaggccaggaatttccctgaagtccccgcctttccctgaagtccccgccctccaagaggcagagctcaccaatgaccacggcgctgaccgtcagcagaatgaaggcgtttcggcgcaggaagcgcagcacgtgctcgagggtcatggtctgcaggcgcaggcgcgtgcgcagtgctctctgctgcaggctttcctgcagccgctgcagccagcccacccggcccagccgctggccgctctcccgcaggaacaggctgttgccatggctgctcatggtctatctgcgggaaacagagaagcctggggctggtgagggccaggacagaaggccggcgtgggcagatggcgaaggctgcgaagggtaatgagcgcttcctgaggactctcagaaggcgggggtggctgggtgttttggctcacgcctgtaatcccagcactttgggaggcagaggcaggagaatcacttgcgcccaggagttcaagactggcctgggcagctaggggtggtagtcctaaatatttgggaggctgaggcaggaggatcacttgagcccaagagttcaaggttacagtgatctatgatcttcccagcctgagcaagatagtgagacctccacccctccaaaaaagcacaaaggccaggcgcagtggcccacacctgtaatcccaacactttctaaggccaaggcaagaggatcgcttgagcccagaagtttgaggctgcagtgagctgtgactgcaccactgcactccagcctgagtgacagagcacagccctgtctctaagaacaacaagtaaataaaaatataactaaaaacaaaatggcaggggagggggaaggtaagtctgttgcgatgtgcccggttctaaggacaggtcttggcaggaaaacgtcaagtctccagaatcattcctgagaatggctgggaagaggaggaaaccacaaaaataatggacctttttgacacaccctgactccagcccactcttatttcactgagatcatcacaagcctctgggggctgccccagtggctcaagggaaattaacaagcctttgtgaagtgccagctgcatacggagccctagacaaagcacccggaggctagtcccccaaattaggacggttttgtgtccagcctggaggcttttcacaaggacaaaatcagcaggtgcctggcaaacagcaggtgcccagtaaatgcagctattctgcctgaatgcccaggtgagcaacagggagagcggggagtcaggagagcggggagtcccttgggaatgaaatgataatgattcttggccacagtgtgatgttcatgagcccctctggggtggcaggcactgtactgatgtttcccaaactgcaggcttttgcgtctcctctttatatttggccatatccatgtgtccttattcacttacctaaaaaacagtaccgaaccaggcgtggtggctcacgcctataatcccagcactttgggaggccgaagcgggcagatcacttgagctcaggagttcgagaccagcctggccaacacagtgaaacaccgcctctactaaaaatacaaaaattacccaggcgtggtggcaggtgcctgtagtcccaactactcgggaggctgaggcaagagaatcacttgaatccaggaggtggaggttgcagtgaaccgagatcgcaccacagcactccagcctggacgacagagtgagactctgtctcaaaataaaaataaataaatacttttaaaattaaaattaaaaatgtatctaaaatggaaactttagacccctacttgaaatgtgaattatatttttcatcaacattaaataaaatgcatataaaaattaaaacttgcccatctgtctaccaactaaacacctcacgtgtacagggcggctcagaaattgtgattttcatgggcctgaggaacttttctctttgtgcaccccttccttcattaaaaaaaagcctacattaaaattctatttcacaactgcattcatataaagaaaaatatgttatttcagaacgagatagaggtgacaattattgcacaacataatgaaaatactagatgctattgaattatatgttttcaaatggttgcttttgtgttatgtgaattcccctcaattttaaaaattgagccagctgctgtggctcatgcctgtaatcccagctacttgggtggctgagtggggaggatcacctgagcccaggagttcaagacctgagacagaatgtcgctctgtcaaccaggcaggagtgcagctcactgcagcctccaactcctgggctcaagtgatcctcccacctcagcctccaaaagtgctgggattgtaggcatgagacaccgcacccaccctaaaaaaattaaaaattaaaatgaatatgttaatattctacattataacattctttcacctaaatgcttgtttctgtcttctgattttgaaagagatgaaaacatcagggaaatagtagaattgtattagaggctgggaagggtaggcgggaggagaggatggggagaggttggttaacagatacaaaactacagctagatagaaagaatgagttctggtgttctgcagcaccgtagagggactatggttaatgatcatttattctatattttccaaaaagccagtagagaaggttctgagcattcacacattaagaaatgatcaatgtttgagatgatggatgtgctaattaccctgatttgatctttacgcattgtatgcatgtatcgaaatgtcactgtatcccatcaatatgtacaagtattttgtatcaactcaaaataaaagggaagcaaaaaaaatgaaaacggccagggcgcagtggctcacatctgtaatcccagcaatttggaaggccgaggtgggcagatcacttgaggtcaggagttcgagaccagcctggccaacatggcgaaaccccatctctatgaaaaatacaaaaattagctggatgtgtcacacgcctgtaatcccagctactccagaggctgaggcaggagaatcgctttgaacccaggaggcagaggttgcagtgagccaagattgcaccactgtactccagcctgggtgacaaagccagactttgtcaaaaaaaaaaaaaaaggaaaaaaaaaaaagaaagaaaggagggaagggaacggaagggaagggaaggggacaaagggaagggaagggaaggggacaaagggaagggaagggaagggaaggaaagggaagggaagggaagggaaggaaagggaagggggaagggaaggaaagggaaggggacttttctgtgggtccctaaaagcactgtgtgctataggtactatacctcctaacctacactgttctcataaccaagaaagggtggtgcccttcttccaggcatactgagaattctgttcttccttctagacccactcttaggctccctctcccatgggctccctttcgatctacccagtggaaaggacaacagtatggagatttctcaaagaactccatcccatccagaaacctccctactgaatatccaccccaaggaaaacaaatcattgtatcaaaaggatatctgcactggcatgtttcatcacagcaatattcgcaatcgcctagatatggaatcaacctaagtgtccaccaatggacgattaaagaaaatgtgatatagataagtttatcatattatagataaatagatctgtatcacatttatatcaatatcacattttcttgctacattgttgattacagtattttatctatgtttcattatgtatatcatggaatagtaatcagccataataaagtgtcttttacagcaacacacatacaactggaggccattctcttaagtgcaataattcagaagcaaagtgtaataccacatgtttacttatttttagtatttttgtatttttagtagagacggggtttcactgttggccaggctggtctcgaactcctgacctcaggtgattcacccacctcggcctcccaaagtgctgggattacaggtatgagccacagcgcccggctgccccccatctacttcctaagggatcaaggctccctgatattttttctcacccgcaccccagccacacccccagtacctgaattcaaccaggtcgagctgcaggtttcttggaggtctcagttttaccagtacgtaggtccctggcctttgtgttttgctgccactggcttttctgggatcttccttgccctcctcaactccccaccatatccaagggatgggaaatctgccctgattttccagatcctgcgtcctctagagctaatccaaattcccaatgccaagccccacttaggatcctgctccaaatggacccatctcctgaaaccacaatgctgcttctccttgctgtgaaaaaaaaaaaaaaaaaaaatcccaaagagtgaaccacagactacacagggaatccctctgggatattatgtttccagtccctaagccacagcaggaagttgcctgtagataccaagggagatcattcagctaagatctgaacagtcaggaaaactcccgaggctagagttttgtccggttcctttctcttccttacaagacataatacggtattgacaaactatggtctgctagtcaaattcagcctactgcttgtttttgtaaataaagttttattggcacacagccacactcatgcattacctattgtctacagctgctttcaagctacaatgcctgagttgagttgttgggacagagattgtacgggccacaaagctcaaaatgtttactcttgggccatttgctgaaaaaatttgctgacccctggagaagagcagacagcacttagcatctgtgggccagacgcagtggctcatgcctgcaatcccaacactttgggaggtgaaggctggagaaccgcttgagcccaggagttcatggccagcctgggcaacatagccagaccctgtctcttttttaaaaattaaaaattagccaggcacggtggcctgtgcctgtagtcctagccactcaagaggctaaagcaggaggatcgcttgaacccaggagtttgaggctgcaatgagctatgatcgtaccactgcactccaacttgggtgacagcgtaaaaccctgtctaaaagaaaagaaaacagcatcttagcacctgatgaccataaaatagttgccaactgtggttgataaaaagcagaaacctaactcacacaaaattaagaatagagtaaaatgctacagtgtgagaatgtcttactatcaatttttctcagtcctgtctgcatcacttataagtatataccatcatgattgtcaattaataataatactagttttaaaaaatgtttgacttgaaatgtgatcttagactccacttgggcctctctgggtctctctcttctcccccaccctgggctctctcttttctaggctttcctgggtctaggctttcttttggacctacctcttgggtttcctgctcagaaaatgtcccttctagtgttcccagtttctacagggtgaggggtgagggtgggtctttcccacttggttctcccgacctctagacacttagatctgatgagatgtgtgggctgcttctcggagcctcttacatccctaaaactaaagcaagctacagtgagcaaactgaaaatgctttctgtacattttatgtcaatgctatgctagccagaggagtgagtgagggaagagagagacggcatggaaaccaagtacatcacacacactcagacacacacacgcacacataacctcgaaaacctcttgtatgcaattgacatatccacaaccccagacagacacagtcacatgcaaactcttcagacatgcaaccacacacacacccacacaaaccttcagaaatgcagctccatgcatgcagtcatacaatccctacacacacacacttcccacattcatgtacaccctcaggcacacaaccacacaccttcagaaatgcaattccaggcacacagttgtacaattctgcacacagacacactcacacatacacttgccacattcatgtacaccctcaggcacgcaaccacccacaccttcagaaatgcaattccaggcatgcagtcatacaattctgcacacacacatacacattcatgtacaccctcaggcacacaaccacacacaccttcgtggctctgcacaactacccttcatgaattaaatcttacagaggcagtgacagccatacaattcctacctacacacagaaacacacacacacacactctttagggcacaaaacacaaacttcagactttcaaaatcatcctcacatttaaacattcagctccacacacctgttcaggacggcgatcccactcacaaattcagtctctctctctctctgtcacacacacacacacacacacacacacacacacacacacacacacactaatgcccagaccctctgcagcctcagccacatcagatacatctgaaattggtgaaataagccctctgacagagaaggcaaccgagccctataaatgcacaaggcatcgggctcggtgctggaaacgtgcctgtgtgcggaggccacgggttggggaggtggggagacgggcagggagacccggggataactaaggggataggaaactcaccagaacgaccaggagaaaagcggtggcaacggctctaaggggcaagcaggagctcagagacaaagggcggcggagaagtggggacgtgggcgcagggagcgccccacacgcctgaccccagcgcctcggatcccccacctgcccgcaacctccgcgccgcagccacaccgagtccccgcgccgagccgcggagtccccactcaccggcgtccggagcggcgggggcggcctgcccgcgcctcggcctgcgcgctgcgcccggatgcaggagccggagcccggcgaagcgcccggccggggccgcggggacccgccagggactgtgcagcaccggcgcggggaccggaccgtggaggcaccggcgcggagccgggacgcgctatgctgcgggagggatccgggccggccctgcgctcacgtgggtgtgggggcaccgagcggccgggggagggggcgggatcccctccgcgatgccctccgcctcccccgcgcccagcccaggctccgcagccgtgtgggagaagggggacagcgtgcttgcgaagggagggggactgggggtgggcgggggtgagtggcctctccggcatccagcccccgccccctgctcggagccgcgcctccgcgcccccgccccctaaaccgcctccggagccctcggaggccccagcatccctggcggagcgcggggaacaggccctggcaccgcgggacccgctccagcagcctcggcggaggcctggggaaggcgcggctctagtgtcccagtaacaacagccagggagagggctccgctgcccccttctccttgcgggtgcaccttccggccttggccacttggctgctgtgtgcccttgggccaactcctctccctctctgagcctggcttcctccgctaaacaaggaagatggcttggccgaccccacagaaaattaaagctgagaaaattaaagcgcgtgaggctggaaatgctccgtgccagcgcgaagcactgggcaaatgggagatggataatgtcgttcctattgtaattaatattattctttgctgtctttagagcacaccaggcaaggtgcactcgacttttcttctcgaaaggcaatgacttggttgcttcccacatcttctgcctctcctgagagctaatgccatttaaagatctgagcatcaggtctgtcgtatgaataaaaactcagtgcaggctgggcacggtggctcacgcctgtaatcccagcactttgggaggccgaggcgggaggatcacttgaacacaggaggcggaggttgcagtgagccgagatcgcaccactgctctccagcctgggtgacagagcgagactccgtcaaaaaaaaaaaaaaaaagtcagtgcacgttcaatgttttttattattgttgttgttgttgatgaagtgttgatggcgacctcctgaactaggcaggctcttttattaatacttatatttaatctacacactcctataaagtatatatcacttcctctattttcagggcggggacaggtgctcagaaaggttcaataacttgtccaaggtcacacagccaggaaacagatgccccaattctaattctttgcatgcatcgccctggctctgcttctttgcaacaactcctagataggtgattctcaaacttagctgtattttaaaactacctggagaggttttaaaaattctgaagccagcctgacatagtggcccatgcatgtaatcccagcacattgggacgccaaggagagaggatcacttgagcccaggagttcaagatcagcctgggcaacatagcaagactctgtctctatttaaaaaaaaaaaatcaaaaaattagctgggcacacacctgtagtcccagttactcaggaggctgaggcaggagggtcacttgagcttaggaatttgaggttacagtgagctatgattgtgccactgcacttcagcctggacaacagagcaagaccttgtctaaaaaaaaaaaaaggaaagaaaagaaaagatatctgatgcccaagccacaccctataccaagcacatcagcatacctggaagtgggacccaggcatcagtatatttgaatgctccccaatgtatggctaaggctgaatctctgtcctagatgtcagattcccctggaccacattggcaacccctctctgcagccttctcactccgctgcttcagtcactcactgtgcttagacgattctgcatccttcttgaacctagagctgcccctgaactcctgcctcttacggtcattcactccacaaatacttactgtgcacttggatgtgctagaggctggagactcagcagcgaagacaacagagccctcggtctgtcacgcaaaataataagtaaataaaatagcagttgttccctggcaattggccttgcaagccctttacacccgtaacaatcagggaggatcccaaagaaaccataactcaagcctaagcatgagaaaaacatcagactaatttcaatagagaggcatccgataatctacctgcgcagtcctcttcaaaacagtcattaaaaattaaggaacatgtggagcagggtttggtggcaggtgcctgtagtcccagatactcaggaggctgatgcaggaggaccgcttgagtccaagaggttgaatctgggaccgcttgagtccaagaggttgagtttgcagtgaactatgattgtgccacagcactccagcctgggcaacagagcgagaccctgtctctaaaaaaaaaaataaaatttaaaaatgagaaaacaaggaatgtctgagaaactgtcacagccgagaggagtctaagaagatatgacaacaaaacgtaatgtgagatcctagaaaagaaaaaggatataaggaaaaaattaggaaatctgaatagagtatgggctttcgctaataataatgtatccatattggccgggcatggtggcacacacctgtaatcccagccctttggaaggccgaggtgggcaaatcactagaggtcaggagttcgagaccagcctggccaacctggtgaaaccccgtatctactaaaaatataaaattagccaggcatggtggcgggtgcctgtaatcccagctactcgggaggctgaggcaagagaattacttgaaccccggaggcagagtttgcagtgagccaaggtcgtgccactgcactccagcctgggcaacagggtaagactctgtttcaaaaaaagttatctgtaacaataacattttgttaataatgtatcaatataataatatatcaatattacaatatggtaattatacaaatgtgccatactaatgaaatatattaataacaagtgaaactaagtcaagggagcatatgggagctgtctgtactatcttttcattttttatgtaaatctaaaactgttctcagaaactgtgtcttaatttaaaaagatcctgggagatcccaaagagcttttctttatataggttatagctattgatctttacagtatcagaaattaaaactgaaaaagtgtttcaacatttattcattttaacataacaaaaataaacctactacatgttaacataaaatagcatatttttacgaaaaataactgtattttccaaaacaagaacaaaaaaagaagagtgacattgttttacactttttcaaattgctttaatggctaccttcatcaaaaggaaacggaatttttatacagttgattttcattattcacggattctgtatttgcaaagtcactcactcactaacatgtatttgtgaccccaaaattaatacttgcggagattctgacatttttctgggtcatttgcagagagattaacattttgagctgcacggcgtgaacatttgtagctgaggtgcaaaagaaccatgctctgttatcttgtttcagctcatacagtgaacaagcatcctatttgtggcctgtttagtgccatacttttctaactttcatgttttttgttgatttcgctgtttaaaatggtcctgagcactttgctgaagtgctgtctagcgtttctaagctgaagtgctcagtgtgtttctaagctctagaaggttgtggggtagctgggtgtggtggctcacacttgcaatcccagccgcgctttgggaagccaagacaggaggattacttgagcccaggagtttgagaccagcctgagcaacatattgagactcccccatctccacaaaaaattttaaaatgagccaggtatggggggcgtgcctgtggtcccagctactcaggaggctgaggcgggaggatcgcttgagcctggaaggttgatgctgcagtgacctatgatcgtaccactgcactcctgcctgggcgacagagcaagattttagctctaaaaaacaacaacaacaagaacaacaacaccaaaaaaaaaaaaaaaaaaaaaaaggctgtaaggctgtaaggctgtgacgtgccttacagagacaatatgtatgttaggtaagctatgctcagacataacttctagtactgttggccatgagctcaatgttaatgaatcagcaacatatattaaatatggagtctttaaacaaaaacacaaataaaacaaagtatatatcagttgacaaaaatgttgtgaccaggtgcttacagaaactaaatcttgtacttccccctggaagcagtgatttagtatttgctacttcagtgttcaaagcaactttatagggctgggtgcggtggctcatgcctgtaatctcagcagtttgggaggctgaggcgggcggatcatctgaggtcaggagtttgagaccagcctgacaaatatggagaaaccccgtctctactaaaaatacaaaattagccaggtatggtggcgcttgcctgtagtcacagctacttgggaggctgaggcaggagaatcacttgaacccaggaggcggaagttgcagtgagctgacatcgcaccattgtggtgagccgagatcgtgccattgccctccagcctgggcaacaagagcaaagctccatctctaaaataaaaaacaaaaaaaaaagcaacttcatagaatataactaccatgaatcatgaaaatcaactgtatctgcttctgcattgaatctgtaatggtatattgttttggttgaaatacatgaaaaaaattcagtcttacacagacaggcagttgaaaagggaagattattttaatcagcttttcaggtaactgtgtctattctttgagacgacaccaaaatgctacatattttagtttcttcaagaacagttgcaatgcagaattggaaaccctgtccgtgaattcttgcattctgttaatattaaaatccattaagctcgtcttttaaccatgcatgattttgaaacctcatgcattcgtcatttgaaaaatgttagctcactagttacagatctgctacatattaacacatttcattatgcaatagcaaaaagtcatgtttgttaatatcatcactgatctcatggaaagttttaaagtgttgggaagttctcagagtcgtgaatacaaatttttaaaaattataattttcactcaaaagtgcaatttttttgtttgtttgtttagatagagtctcgctctgctgcccaggctggagtgcagtggtgtgatctcggctcactgcaacctccacctcctgggttcaaacaattctcctgcctcagcctcctgagtagctgggattacaggtgcgtgccaccatgcctggctaatttttgtatttttagtagagacggggtttcaccgtgttggccaggctggtcttgaactcctgaccttaggtgatccgcccgcatcggcctcccgaagtgctgggattacaggcgtaaaaagtgcaaattttatcattgacaataatgactgtgaatcattttccttgaagtgacagatatatttctttcatttttgcaaaaatgtctgtcaaacctcctttgatgtggtttggatgttctgtcccctccaaatctcatgttgaaatgtgacctccagtgttggaggcaggcctagtaggaggtgttttggtcacgggggtggattttttgtgaatggcttgctgccattctcctggtaatgagtgagttctcactctatgagttcatgggaaagctcgctgtttaaaagagcctgacacctcctccctctctctttcttgctgtctctcaccatttgacatttctgctccccttcaccttccaccatgactggaagctgcctgaggccctcaccagaaacagatgccagtgccatgcttcctgtacagcctgcagaactgtgagccaaaataaagcacttttctttataaattacccagtctcagatattcctttatagcaatgcaaacagtctggccgggcacttggctcacgcctataatcccagcctttgggaggccaaggagggaggatcgtttgaggccaggagtttgaggccagcctgtccaatatggcaaaaatccatctctacttacaatacaaaaattagctgggcatggtggtgcataccactcagctactcaggaggctgaggcagaagaattgtttgaacccaggaggtggaggttgcagtgagccgagatcacaccactgcactccagcctgggcagcagagcgagactctgtctcaaaaaagaaaaaaaacaacaacagacacacacacagactaatacaccatgtcagaatagctgaggtttgtctgtctaaaaatggaattccatgaaaaaaagtagctggttcagcttgcaattcaaacactcacacaagcagtaattttttttttttttgtcttggagacagctaccatgatacttctgtgtgtagaaaaattttttatccatacttcccgttgcatcacacagaatattaaaaagacatatactcaagagtcaagatttaataaaatgggccagacacagtggctcatgcctgtaatcccagcactttgggaggccaaagtgagtggatcacctaaggtcagaagttcaagaccagcctggccaacatggtgaaaccccgtctctactaaaaatacaaaaaaaaattagcccagcatggtggggggtgcctgtaatctcagctactatggaggctgagggaggagaattgcttgaacctgggaggtagaggtttgcagtgagccgagattgcaccattgcactccagcctgggcggcaagagtgaactccgtctcaaaaaaaaaaaaaggatttaataaaatgaataattgtattgctttatcaagtacaagcctaaatgaaactggctttttttttttttaagacagggtctccctctgtcacccaggctggagtgcagtggtgcaatcatagctcactgtagccttgacatcctgggctcaagtgatgcttccacctcagcctcttgagtagctgggaatacaggtgtgcgccaccaggtctggctaatttttcctctacttttttgtagagactgggtctcaaactcctggactcaagtgatcctcctgcctcggcctcccaaggtgctggaattacaggcatgagtcactgtacctggcctgaaactggcttttgttaaaaccatgagtgtgtggcaatgaagaatataatgacccctagtacagtttggtgctgctgcgttgattcacgcttacatgatagacactgttactcgcccttacttttgctccatgagtgcatagactaacacagtgaaaaaaggcaaataatatcttagaatgattattaaaatcattttgaccttgcagaccccctgaatggtctcaaggctgccacacctggggatttgcaggctacactttgcaaaccattgtcagatggtgataagtcctatggggaaaaaacaataatgagggctggatgcggtggctcacacctgtaatcccagcactttgggaagccgaggtgagcggatcatgaggtcaggagatcgagaccagcctgaccaacatggcgaaataccgtctctactgaaaatacaaaaattagccaggcatggtggtgcacacctgtaatcccagctactcgggaggctgaggcagaagaattgcttgaaccccaggaggcagaggttgcagtgagctgagatcgcaccactgcactccagcctgagcgacagagcaagactctgtctcggaaaaaaaaaattttttttaattaaaaataataattataatcaggaaaagaatatatggagggtgaggagagagtcacagtcttcattaagcagttagtgaatgtccgagtgcgcaggtgatatttgagcaaagacgcaaagcagataaggaagtgagcagggaggatgactacaggaagagcaatccaggtagcgggaacagcaaatgcagagactctgagcagaatatgcctgtgctgtttgaagcccagcaagtacatcatgagtctcccccagtatgttccacagcagctcagactcaaaccatgcccagctagaaagcatttgcaaagcaactcagggagcctagtccagcagagcctgccttttcggttttggcttttttatttgttttggtttggttttttgagacaggatctgactctgttgcccaggctgaagtgcagtagggcaatcatagtttactgcagctttgaattcctgggctcaagcaatcctactgcctcagcctcccaagtagctgagaccacagatgtatactaacaatacaaaaatcagccgggcgtggtggtgcacacctgtaatcccaactactcaggaggctgaggcaggagaatttcttgaacccaggaggtggagagccttctggcatattccccaagtctgctgttagcttccctatcttagtgcacctgaagggaaaggaatgtgtttattaaggcccactgttttactggggcccgttgtatgagggtgaagtttggcagttaaccaagagactttctccccacctccctctgtgccccagctgtcttatttgtgttttatggtctgctctttctgtcttcttgtagttagaagagaagtgatctccctaaaatgcatgaggctagaaaaggagctggaacttaaagtagctgtgtttgtccaagatgatggtgcttctgctctgtgaaaccttatgttcagaaaacaaataacccaattagaaaatgggcaaaggacttgaacagacatttcttaaaagaagacatacaaaatggccaacaggttcatgaaagaaaaaatgctgaatataattaatcatcagggaaatgcaaattaaaaccacaatgagatatcacctaatacctgtcagaatatacaccatagaatactactcagccattaaaaaagaatgaaatcatgtctgttgcaacaacttggatggagctggaggccattatcttaagcgaaataactcagaaacagaaagtcaaatactagctggtgtggtggctcacgcctgtaatcccaacactgtgggaggctgaggagggaggatcccttgagctcaggagtaggagacgaccagcctgggcagcatagcaagatcccatctctacaaaaaataataataattacctgggtgtggtggtgcacacctgtagtcctagctactcaggaggcagaggtgggaggatcacttgaactgaggagctcaaggctgcagtgagccatgatcgtgccactgcactccagcctgagcaacagagcaagatcctgtctttaaaaaaagaaggaagaaagtcaaataccaaatgttctcacaaatgggagctaaacgatgggtacccatggttttacagacaccggcaactccaaaaggtgggagggtcgggggctgagggatgagacactacctgttaggtacaatacacattatttgggtgatggctacactaaaagcctagactttaagagtattcaatatatccatgtatcaaaactgcactgaacccccaaaatctattttaaaaaaaattttttaaggaggagtttcactctggttgcccaggctggagtgcaatggcgtgatctcggctcactgcaacctccacctcctgggttcaagcaattctcctgcctcggcctcccgagtagcttgaattacaggcatgcaccaccacgcctggctaattttgtatttttagtagagacggggtttctccatgttggtcaggctggtcttgaactcccgacctcaggtgatccgcccacctcggcctcccaaagtgtggaattacaggcgtgagccaccgtgcccggccaaaaattttttttaaagaaaaaagataagtggtcaggggaattcggagaaaagacaacccatgtgctctgttggtgggaatgtaaattagtacagccattataaaaaacaaaacaaaacaaaaacagtatggaggctgggcacagtggctcatgcctgtaatttcaaaactttgggaggctgagtggggtggcggggggtggggtgtggatcacctgaggttaggagttcgagaccagcctggccaacatggtgaaaacccatctgtactaaacatacaaaaatcagcgtggcgtggtggtgcgcacctgtaatcccagctactggggaggctgaagcaggagattcacttgaacccaggaggtggaggttgcagtgagccaagttcatgccactgcactccagcctgggcaacagagcaagactctgtctcgaaaaaatagaagaacagtgtggaggtttctcaaaaagttaaaatagaattaccatatgatcctgcagtcccactactggatatgtatatctaaaggaaatgaaatcagtgtctcaaagagatatctgcacccccatgctcattgcaatgttattcacaacagtcaagatatggaagcaacctaagtgtccaccgagaaatggatttttaaatgtactatgctatgcagttgtaagaaaagaaaatcctgtcatttatgacaacatgaacaaatgacaggatttccttttgatgaacctggagaacattatgttgggtgaaataagccaggcactgaaagacaaataccatgatctcacttacatgtggaatctaaaaacaattgaactcataacagcagagaataaaatgatgattaccagagactcaagttggaggattggggagatgttggtcaaaggataccgaatttcagttggtaaagaggaataattttggctgggtgcagtggctcatgcctgtagtcccagcactttgggaagccgaggcaggcggatcacctgaggtcaggagttcgagaccagcctgaccaacgtggtgaaaccctgtctctagtaaaaatacaaaattagccaggagtggtggcgcacacctataatcgcagctacttaggaagctgaggcaggagaatctcttgaacttgggaggcggaggttgcagtgagccaagatcataccactgcactccagcctgggcaacaagagtgagactctgtctcaaaaaacaaaacaaaacaaaaaaaaaaaaaaacgaataatttcaagagatctgttgtacaacatggtgactctagttaataacaatacagtgtattctagacaaatgctaagagagtagattgtaaatgttcttaccataaaagtgaactttggaaggcaatgcacatattgatgagctagatttagccattccacaatgtgtgtgtgtatatttcaaaacatcatgctgtacacaacaaatacacacaattttatctgtcatttaaataaaattttaaaataaaaatatttttaaaacacaccttaaaaaacataatgctgagtgagagaagccggatacaaaaggccacataagtgtatataattctatttatatgaaatgtccagaataggcaaatcctatcctagatttggaaagcagattcgtggttgccaggggctgcaggcgggagaaatgatgagtgatgctaaagggtatagacttccttttggggcgattgaaatgttctggacctagatagaggtgatagttacaggacactgggaattgtactctttaaaagggttaatttgactaggtgcggtggctcatacctgtaatcccagcactttgggaggccaaggtggatagatcactagaggtcaggagttcaagccccctggccagcatggtgaaaccccatctctaccaaaaatacaaaaattagctgggtgtggtgatgcgcacatgtaatcccagctactcaggaggctgaggaagagaattgcttgaacccgggaggaggatgttgcagtgagccgagatatcgccactgcactccagcctgggtgacagagggagactctgtgtcaaaaaaaaaaaaaaagacaattttacattacacaaatttcacttcaataaaacaaaagtaaaggagtaccaaaaaaacctcggtattaaagagaaacaatatttcaatgaaatctttttagaaatcaaaatgaatgcaaaaaaatccacaatgaacaaatagatcaacatgttaaatcaagacaggaccaaagttcctacttttccttctgcttttttcttttttttttttttctagagggagtcttgctctgtcacgcagtggcgtgatcttggctcactgcaatctccgcctcccgggttctagtgattctcctgcctcagcctcccgagtagctgggattacaggtgcctaccaccacgtccagctaatttttgtatttttagtagagacggggtttcaccatgttgggcaggctggtcttgaactcctgaccttaggtgatccacccgcctcagcctcccaaagtgctgggattacaggcgtgagccaacgcgcccagtgccttctgcttttcaggctcctgtgtggctcagttcagcactcttactgattctatcttgaacattctgctatttgggttaaccatggattgtttgcattaatttcatgagttgtttttaattattgacattggagtattatttagcttagtcgccggttttttggtgctacctgatattttgtatgtgggactgactggtatctcaacctcactgtggccttgtgagtctcttgctctctcaacagtaaaggctgccagctcccttttacagataagaagggtctcaaagaggttaagcagcaggcctcagaattaataaagagcagggtcacggccgggtgtagtggctcacgcctgtaatcccagcactttgggaggccgaggcaggcagacaggtggtgcgcacctgtaatcccagctactcaggaggctgaggcaggagaatcgcttgaactcaggaggtggagtttgcagtgagccaagatcatgccactgcactccatcttgggctacagagcaagactctgtctcaaaaaaaaaaaaaatgagcagggttagattggagcccacatctgtctggctcaaacctccagccaccccaggtccactctgaccaaaggctccaactctggccctagcattaggagggcagggcagtgcagacggagcaccccgggctgtcccagacgactgccccagctgcaaggtggagcttgaacacgagctgagccaagaagagtctgagaccgaggaattgaggctaattcctctgtgggaaacgctccctattaattaattagggcagagctagcctgaggcatccccgcagcccccagagtcattaaaggagagggagtctcattatcggctaacagcttccccaccgttcccagggccccagagggagcagaggaggtgggaggaggaccaggtctccccgtcctgatcccctgtctttcattaccagagtggcctgatatgcaagcgaattgtctaaaagtagaatttcaggggaggtaaaaaagggaaagtcagaactgagggattcaggataccccctcccaaattcagtctgcacttatatttatataaaatacccagcacaggtaaatccataaagatagacatccaattagtggttgcccagggctggagtcggggggcaatggtgagtgactgctgatgatgggtagagggtttccttctgggggggtgaaagctgtagtcaaacttgataatgctgacggtagcacagcactgcaaatgtactaaagtcactgaaccgtcaactttcaaatggtcaattttatgttatgtgtattttataatttaaaaaaatcaatctccttctcattcctggctatttcatcaacatttattaacatgtgctttctgcccggcattgtactgggaggggaggcctggtgccaccctggcaactctgtcttagtgagagatgtcatggtcaacaactgtttgaggcctgcatgcaaggggtaaaggaatttaccaagacaagagtgagttttaaaaggcagatgtattaaagaaaggaggacatgcattgcaaggatgcaatgggtaagacagcagaaggaaggttgtctgctgtctgaaaagagtcaggggctggagggaaagttttataaggtggtgctccttcagctgagtgcttgcagacaggatggttgggtgcaggtgggcagtgagctgagtgcttgcaaacaagatgcttgtgtgcagatgggctgtgagctgaaagcttgtagataagatgcttgggtgcaggtgggctgtgagctgagcacttgcaacagaatgcttgggtgcaggcgggctgtgagctgagcactagaagctagcgggccttttgcagttgaccccatttctcagaacatttgcttctctcaaccccagataagcccattctttaagttttcttttaactccttagggctccacacgaaatgatgctggagaccttcaagatggcctccagggatgttctccatctgtcctccccttgttctgtgtccaggttcatggatcaaaccaacaagaagccttgtcctctgtcttctggttggcttcaagcaatgggaagcccttacaggaggcaagagggatgaaagagggtgaggccagagtatttatttcctggggtgcctccctgcatcccccctgcagattggccctagactgcagagcacaaggtcctggctggcagccccctctaggttccagtagtaacagctccctcccctctctgcatctgcccaggagtggtaataacccccagatgctgactgctccacgtaactgcatggattctgcaatcctgtatggtttctttaccccctaccacaccttgacccaactcccctcaaactgcccagtctaccctccatctttctccaggggttagagagaatgcaaccctccgacttgctctgcaccccagaaggtggatttttgtggctatcaatgggctgcctgccttggagaatctggtggggttggctttgtgaaagtaaaataaatttggggaccccaaaatcactaagccaaagggaaaagtcaagctgggagctgcttagggcaaacccccttgcctttctattgcttaaaaagtttgggtgcgccatcctgagtttctttctgttcagacttccctcttgatatgtatttagaagaggaagaagaaaaataagcaggcaggtagtaaagtataatcacaatgggatagtattcagccacaaaaaaaataaggaaatcctgccatttgcaaccacatggatgaactcggagaacatgatattacaggaaataagccagatacagaaagacaaacactgcatgatctcactcatatgtggaatcctaaaatgttgaactcatagaaaaagagagtagagtggccgagtgtggtggctcacacctgtaatcccagcactttgggaggccaagacgggtggatcacctgaggtcaggagttcgagaccagcctggccaatatggcgaaactccgtctctactaataatacaaaaattagctaggcatggtggcacatgcctgtaatcccagctacttgggaggctgaggtaggagaattgcttgaaccctggaggtggaggttgcagtgagccgagatcataccacagcactccagcctgggcaacaagagtgaaactccatctccaaaaaaaaaaaaaaaaaagaaagaaagaaagaaagaaagaaaagggaagggaagggaagggaagggaagaaaaagaaagtagaacagtggttaccataccatagccttgggtggttgaggagatgttggtcaaaggatgccaaatttcagttagataggagaaaaaagttcaagagatctattgtacagcatggttaccctattctcaaaaaatgcgaagcgaacagatgcaaatgcttcaccacaaaaatgataactatatgagggaatgcatatgttaattgactagatttagtcattccacaatatatatatacgataaaacgttatgctatacatgatatacagatacaatttgtgtcaatttttaaatttttaattaaaacatatattaaaagtccagatccccaatgttggcatcaatagttgcttaagtgtgaacaaaaatacaatttgacattaaaaaagtaaagtatagtagtagaagtgtcctcagttgacctcatagaagaagagagatggtagatcactggtagatccaggagctaggttaccccggaaaagaacattagacagcaatatcattgatgaagaagagagagggaaggaaaagggggtgtccattttaaagatcttaaagattttttttactatcaaggtaatttatgttcattgcagaaaatctgaaaaatgcagaaagaatagaaggaaacacggtagaaaaaattcaaccaaatcctatttataatcaacactaaattgttggtgaactgctttccaggtggagatatttgtcttacttcaaaattagaatcatgcctacctgctacatgaataaaccttgaggacagtgggctaagtgaaagaagccaaatgcaaaaggacaagtattgtatgattcaacttatatgagatacatagaatagccaaagcaaagacaaaaagtagaacattggttaccagggactgcagagttgcaaggagaatggggagttattgtttgatgggcactgagtttcatctggggaagacggatgaaggtaatggttgcacaacaatgggattgtacttaatgccactgaactgtacacttagaaatatatacattagaatcctgccaattggtcagtttgttctcctcctcctccttctccttccccttctttctttcctcctcctcctcctccctctcctcctcctctttcttcttcttcttcttcttcttcttcttcttgttcttcttcctcttcttcttcttcctctcattgtaccttaagccgttacttctatctgacatgattttgatggtttattttagtttttcatttttcccactgactgacaagctccaggagagaagagaaacttcatcttactgctccactctcctggctcttagcctggtgcctgacacagagcagatgctcaataaacatttgccaagtcactcgatcaatcaatcaatcaagccattaggaaagaaagattttctagtgggcccccaagtctactctccatccttctccaggaggtagaaaggatgcacccctccaacttgctctgcaccccaggtggtggatttttgtggatatcagtgggctcccttccttggaggatctggtggggtgtgaaaggaaaataaatcttgggacccagaaatcactaagccaaagggaaaagtcaagctgggaactacttagggcaaacatgcctccgattctattcctaaaaaagatagctactaagataaaagagctacatatctccctcacaaggaatttccttgcaggcaaaggacagacaaaactcagtcatccctctgctcactgagataaatgcatatctgcttgcctcctttggaaaggcgaatcagaaactcaaaagaatgcaaccatttgtctcttacctacctatgacctggaagcctcctccctactttgagttgttccacctttctggatggaaccaatgtacttcttacagatatttactgatgtctcgtgtctctctaaaatgtataaaaccaagctgtgcccagaccaccttgagggcatgtcatcaggacctcctgaggatgtatcacaggcactcatttttaactttggcaaaataaacttcctaaattgactgataattgtctcagatatttggggttcatagcttaaaagaatccccagaaaatggcagcattggggcagattaaggcgggaaaccaggatattagaagatgagcttcagacagccaagagagcaagtggctgcttctcccttgctctgctatttgagatgcttccccggtgcacctacctgtgataggcaatgccacacagagacaggccaggaataggcaggggaccctcagctaaaggagcagaagccattatattagttttctagggctgccataacaaatcacagcaaattgtctggttgaaagccacaggaatttattctcacacagtcttggaaggcagaagtctgaaatcaaggtgttggtagggctgtgctccttccaaagctctggaggagaatcttcccttgcctcattctagtttctcatagttgccaagaatcctgggcatttcttggcttgtatatcctctactccaatcttcatgtctttttttttaattgacaagtaaaaattgcatatatttatgatgtacaatatgatgtttgtgtgtgtgtgtgtgtgtatgcactatggaatgaataaatcaagctattaacatatgcatgtaaactaaaaataaaattctatgccctaccaaccatctgaatggacccctcttggccaagggcattccaaaattaacctgaaaaactagttcaggccatgatagaaagacggaatcagacatgcctcattaagctctcttccctttggaattcaggcatagctggccagcattaacattaaaacagagatcttggccaggtgtgatggctcacccctgtaatcccagcactttgggaggccaaggtgggcagatcacttgagggtgggagttcaagaccagcctggccaacatggtgaaaccctgtctcttctaaaaatacaaaaattagccagtcattgtagcacatgcctgtaatcccagatattcaggtggctgaggcaggagaatcacttgaacccagcagggagaggttgcagcgagccaagatcatgccactgtactccagcctgggcaacagagtgagactctgtctcaaaaaacaaacaaaacaaaaaaataaacaacaacaacaaaaaaagcagagatcttaagactttttgtagcaataagacaccaaattccaaattactttagtatagcatcacatgacagatagcaggtcctgaaagaaattgagatattttactctaaaatgtatttctttgacatattttgaaatggctctgcaaagctgtctcttgtgaggaaaatctacactttttggagcatcccttctcctttccaggtcttctccctgatccaggagagaattaactgggtctagaacctttttaagtctgataagaaacatttatttatttatttatttatttatttatttatttatttttaatggagtcttgctctgtcacccaggctggagtgcagtggcactatctcggctcactgcagcctccgcctcctgggttcacgccattctcctgcctcagcctcccgagtagctgggactacaggtgcccgccaccacacctggctaatttttttgtatttttagtagagacggggtttcatcgtgttagccatgatggtctcaatctcctgacctcgtgattcacctgcctcagcctcccaaagtgctgggattacaggcgtgagccaccatgcccggccaagaaacatttataatctactctctctgaagcctgctacctggtggcttcatctgcaaaataagaaccttggtctccacaaccccttattttaacccagacactctcttctatggattccaggtctttatataaactctttcaaccaattgccaattggaaaatctttgaatccacctatgacctggaagccccccaactcctacccacctcaagttgtcccgtctttctgagtcgacccaatgtacacttaacatgtattgactgatgtctcttgtctgcctaaaatgtataaaaccaagctgtagcttaaagaccttgggcacatgtcatcaggacctctcctgtgtcacaggcctgtcaataaccttggcaaaataaacttctaaactgattgagactcatctgagatacttcttggtttacatgcattatctcacatacttatcatttttttgtggtgagaacactgcaaatctctttcagcaattttcaagtacacacagtctccaacttacaatggttcaacttgtgatttttttactctaccgtggggcaaagtagaaaccatcctttgagtagccacacaatcattcttgttttcaccttcaatacaatagtcaataaattacatgagatagtcaacattttattataaaataggtttttttgttttttattattatactttaagttttagggtacatgtgcacaacatgctggtttgttacatatatatacatgtgctatgttggtgtgctgcacccagtaactcgtcatttaacattaggtatgtctcctaatgctatctcttccccctcccccccaccccacaacaggccccggtgtgtgaggttccccttcctgtgtccatgtgggaattgaacaatgaaaaataggttttgtgttagatgattttgctcaactctaggctaatgtaagtgttctgcgcatgtttaaggtagatgaggctaagctatggtgttcagtaggttatatgtattaaatgcattttgacttatgatattttcaacttatgatgggtttatcaggatgtaaccttatcataagttgaggaaaatctctatgcaatatactgttattaactatagttgccacgatgtataacagatctgttgaacttattcttctcttctagctaaaattttgtgtcttctgaccaacatctccccaattgcccccaatcctagcctctggcaaccaccattttattctgtttctatcagtttgtcttttttaccttccacatataagtgagaagatgcagtatttgtctttgtgcctgggttatttcatttagcctaatgtcctccagcttcatccaggttgttgcaaatgacaggatttccttctttctaatggctaaatagtattctattgtgtatatgtgccacattttctttatccaaccggatggactcaggttcattccatatcttggctactgtgaacagtgctgcaataaacatggggagtgcaaatatctccttgacatactgatgccatttcctttgctgatcatcatgttttcacacggcattgtccccatgcatctctgttctcttatacacatggccaacttgtcataaggacaccagtaggatccaacccactccagtaccaccttaccttacttacatctgcaatgaccctaattccaaataacatcacattcacatgtaccacaggggaggactccaacatatctttttctgagaggcacaattcaacccataacagtagataagccctttcaacagttcttcttcccacctaatttgggttatcccacaaacagaaaagatgtttgaaggttgaacagctagaacaggaatgttcatagcagaagcagaagaaagtccttggttggtccacacacatggagtatgttttagcatgacagagcagccatcattatgtcactcagcgaacaaatattaagggtctactttgttccagtttgttcccaaactgggctgggaacttagttattcagtaataactaagacaaatgagatgcccaccaaggagctgacattctagagagggaaggaaaagaattacaatctgacaagagctacgaggggaggagggatggcgtatagcccggtggtgtgagacctcaaaccgagtggtcagagaagagttctttaagagataatatttgaacagagacccaaagcaagaaagggagaaagccatataaaaatgcagaataagaacatttcagagaggggaaaaacaaatgcaaagactatgagaataaacacggatggtgagcacatcatgactgatcctttatgatctttggacagagaggtgggagatggaaggaaaggtgggatggggccagatggtaagaaattgggattctgtagattctggtaaggaacttggatgccattctaaacctgaggttcacttcactgaacccacctattggttgtaaagccacagtcttcctaaccttcttattttcttgagacagggtctcactctgtcactcaggctggagtgcagtggcacaatcagggctcattgcagcctcgacctcccttggctcaggtgattctccttcttcagcctccagagtagctggaaccacaggcacacaccataatgccctgctaatttttccattttttgtagagccagggtttaccatgttgcccagattggtctcaaactcctgggcttaagcaattcatccgcctcagtctcccaaagtgctgggattacagtagtgagccaccacacctggccctaacctaactattaatacccaaattcactaatgagaaaaagattttccaagtaaaaagtgaggaatgagaagtgaatggagaatgaaaacctgatgcacacgctatttctcttttattttattttattattgttttattttgttttgagacaggatcttgctgtgttacccaggctggagtgcagtggtgcgatcatagctcactgcagcctccatctcctgggctcaagcgatcctcccaccccagcctcttgagtagctcagattccagatatgcaccaccacatccagctgttttttgttttgtttggtttggtttgggttgggttttttgttttgttttgttttttgtttttaagaaacagggtcttgctatgttgcccaggctagcctcaaactcctggcttcaagcaatcctcctacctcagcctcccaaagtgctggaattataggcatgagccaccatgcctggcttggatttcttcagagtgagcaagtgaaagagcaagcaagagagagcagaacagaagccatgatcgctttgtaacctaatctcagaagcagcatctatcatgtttgccataggctgttggttacaagtgacacatcaggtccagcccacactcaagggattacacagggcatgaggatcaggaggtgaggaccattcagggccatctgaagatgcctaacccagctgaaaaagaaatccatcatatttgaggggtggatggcggacaaccagctagtaaagaacacagagtagaggtgaaaaagaaaacatgtgaaagagcacaggggaggggattcaagtcacagagggctgacaatttcaaagctaccaggaggtcaagttgagcaggatagaaaagaaactggaatttgtccattgcaggaagacgttgatgatggatgcctgagccattatttttgtttgtttgtttgtttgtttgtttgttttcggtttgtgtttttcatttttgtctttttgttttttgtgggatgttgttgttgttgttgttgttattttgttttttgtaatagagtctctgtctcacccaggctagagcacagtggcacaatctcagctcactgcaacctccgccccccgggttcaagcgattctcatgactcagcctcttgagtagctgggattacaggcatgtgccaccacgcccagctaatttttgcatttttgtacagatggggtttcaccatgttggccaggctggtctcgaactcctggcctcaactgatctgcctacctcagcctcccaaagtgctgggattacaggcataagccaccgtgcctggcctgcctgagtcattttgagggactgaccaggggtacagccatagacacaggtccttgtcactcactgaccagcaaggtcactgcctttgcaggagatgacagggaagaaccaggaagcacctcctctcccagcctggggcttcccaccatctcctgacacctccaccagaaaagcgacctcatttctcaaagacaaaacagattctaggtcatatccccctggaatgagagaccaattgatgtgattatctccaagagaaagaggggcacctactaaaagtagaacctggtgtcccagaagggaagacatcggggaacctaaaaaggggtctctgataattacctgccaagatttcacagcgaagggcatctccatgtaatgccaaaaaaaaaaaaaagaaagaaaagaaaagaaaaaaggctagaagttttagaaggtgctccttcttcatccattctgcaatttcactcgatttcgcccaaaagcagaattctgctccctacattgcatgaatcagtatatagaacaggtggccccagcaaagttgcaaaaaggaatttctataaagtgttctttattataaaaatcaagagagctgccaggtgtggtggttcatgcctgtaatcctagcactttgggaggccaagccgggtggattgcctgagctcaggagctcgagaccaacctgggcaacatggagaaaccccatctctattaaaatacaaaaaattagctgggcgtggtggtgggcccctgtagtcccagctactcagcaggctgaggcaggagaattgcttgaacccaggaggaggaggttgcagtgagccaagatcacaccactgcactccagcgtgagcaacagagcaagactctgtctctaaaaaaattaataatgcataaataaaataaataaaaatcagagagctaatttcacaaagaaatataactccctattggcctgagttagaagtatttgggcttcagtatattgggagaagggaaatatgtatagttgtgtatatgcatgcacacatacacacacacacacagaggcatggtgggggaatgaatgtggaaatggttagagtgaaatcaagatcaagttcagaataagtatctctggatagtaaaacaaaaaataaggctggccatggtggcttgtggccataatcccagcactttgagagggtgaggcaggaggatggcttgaagccaggagttcaagacccagactgggcaacatagcaagacctcacctctacaaaaaaaaaaaaaagtcaattgtgatggcatgcacctgtagttccagctattcaggaggctgaagcaagagatctcttgagaccaggagttggaggctttagtgagccaagattgtgccacttcatttcagcctgggtgacagagtgagactctgtctccagaaaaaaaaaaaagattcttattcatttcattatgtttcccatattttatacattttatacaaggtgcataccttgctttcatagcttatttgttagtttaagagaggtatttaggcttggagagtactgaaaaattttcctagtcctcggtcttgtgtacataatgtttctgtagattttttgaacatcactgtttctgttcagacacacgcaggtgaatcacttggaaaatgagagctaatcccagcccagcaatgaatggttccttccagacaggccaggcacagttgctcacatctgaaaccccagagctttggtaggccaaggcgggaggattgtttgagtccaggagtttgagactagcctgggcaacatagcaagatcgtgtctctacaaaaacatttttaaattagccaggcatggtagcacatgcccatagggccagctacccaggaggctgaggcaggaggattgtttaagcccaggagttcaaagttgcagtgagccatgatggtaccactgtactctactctgggtgacaaagcaagaccctgtctcaaaaaaaaaaaaaaaaaagcagggcacggtggcggtcaggagttcacgaatagcctggccaacaatggtgaacaaattgttctactaaaaatacaaaaaattagctgggcgtggtggtgggcatctgtaatcccagctactcagaaggctgaggcaggagaatcacttgaacctgggaggcgtaggttgcagtgaaccgagatcgcgccactgcactccagcctgggcaacaagagtgaaactccttctcacaaaaacaaaaaaacaaaaaaaccagataactcacctgttcttcaaatacatatcaggctagagaagtgtccaaaatgggtcatcaaagccaggagctagcagtgagtttttggaagttgatatagagaatggaaactgggattgggagatggaaatgagaagttggtctgattaagcaatggtctgcaccaatttcaatgcttagataatagtatcatatactagcagcgtgttggtgtcagcgtgttaaactaataaaaagccagaatgtaacagcctgcatagccctaatgcatttcaccagagagccatgtggaagccaaaatcctcacatgcagatctggcatgaggaagcttcctaagcgtctctcaggtagcttggtacaagttctgcccaacagaggtgcttcatacaccaggcagcaagcctacccaaatgagatcccctggttgggaaggtggacgtacttcatgaacaaagcaaaggtagatggttgtgtgcaggtcatctcacatgaggtgtctccctggttctttgtgaaaccctctctggacctcttctggttttgaaatagctcattcatggattcattctattaataaaagtcaaaagtaaacacttacataatgcttactaggtgtcagccatggtgctaagcacttcattcatattaactcattgtctccatgccacaatcctattacctgagttgacagatggggcaacgcaggcacagagatgttaagtgaattgctcgagatcacgtagacagcaagtggcagaatcataatttgaatcctagttcatctggatccagaatacagaccataatatcctcctgatgctcatgaaaatttgttgaaccagataccactggtcccagcagcaaatgactgtgctaaccccatattcccaagcctccatcgccaaaggttatctggccccatttcttgctagtggccctaaagaacataacggcgggtctccaggatggctggcgtgggagtcgctggttgcccatcttattccccccaccccccattactgaatgatcccttgattacaaacccagggtcattcattctttcttgactgtcgcacctctcattcactcaatacgaaaatatttggacaggcacggtggctcatgcctgtaatcccagcacctttgtaggccgaggcaggagaattacttaaggccaggagaccaagaccagccagggaaagatagcaagaccctgtctctacaaaaaaaaaaaaagaaaaagaaaagaaaagaaaatttaaaaataagctatgcatggtggcacatgcccgtagtcctagatacttaggaggctgagagtgagaggatcccttgagtccaggaggttgaggctgcagtgagccatgatcgtgctactgcactccagcctgggtgacagagtgtgatcctgtctgaaaaaataaaataaaataaaaataaaacatgtattgattcttccacttacgtattcctctaataagtacgtattgagtgcttgccatgagccactatctgtgctgggtgctcggtagtggaatacaatggtaaataggagaggcgaggtcaatgccctcatgaagctcacaagtgaaaaacaaatgtccatcattggtcagatggataaacaaagttatggtatataaatgcaatggaatatgattcagccatgaaaaggacagaagcactgatccgtgctacaacatggacaaatctggaaaacacgatgctgagtgagagaaaccagatacaaaaggccacatagtgtgagactccattgacatgaaatgtccagaacaggcaaatctacagagacagggagcagatgagtggttaccaggagctgaggggacaggggaatgagagtgagcgctcgtggggatgaggttttatttggggattggtgaagtgttctagaattcgatacaagtggtgattgcaccacactgtgaaggtgttaatgcctctgaattgtgcaccttaaaatcattcattgtatttatgaaaatttcatctcacaaaaaaaaatcaagtaagatgatcatagcatgtgattgattccatccgtttctttatcctatgtgtattaaggacccactatgtgctatgaactatacagacactgaggatacaagactagcatgcttcctgttctagaggctcttagagtcaatcatcagagaaatgccaattaaaatcacaatgagaggccgggcacggtggctcatacctgtggtcccagcactttgtgggggcgagacgggtggatcatctgaggtcaggactttgagaccagcctggctaacatggtgaaaccccatttctactaaaaatacaaaaattagccgggtgtggtgacacgcacctgtaatcccagctacccgggaggctgaggcagaagaatcgcttgaacccaggaagcagaggttgcagtgagtcgagatcatgccactgcactccagcttgggaaacaagatcaaaagtctgccccccccccaaaaaaaaaccaaccacacacacacaatgagtctgggtgcagtggctcaggcttataatctcaccattttgggaggctgaggtgggaggactgcttgagcccaggagtctgagaccagcctgggcaatgttagcaagactctgtctttacacaaaatttaaaaattagccaagtgtggtggcgtgcgcctatagtcctcgctttttgggagactgaggcagaaggatggcttgatatcaggagttggaggctgcagtgaaccatgatccccccactgcactccagcctgggccacaaagtggggctcagtctctttagaaaaagagagatatatatatacagaatatctattattttaaaagtaaaaagaaaaaaaaacagaggttggcaaggatgcagagaaaagggaaagcttatacactgttggtggggatgcaaattagtacaacctctagggaaacagatggcaatttctcaaagaactaaaaatagaactgccctttgatccagcaatcccactgctgagtatatacctaaaggaagagaaatcattatattaaaaagacatccacacttacatgtttatggcagcactattcactatagcaaagttatggaatcaacttatgtgtccattagcagatgattggatgttaaaatatggtatacaagctgggtgcggtgatttccccctgtaatctcagcattttgggaggtcaaggaagtcgaattgcttgagtccaagagtttgaaaccaacctgggtaacatggcaaaaaccccacctccactaaaaaaacaaaaataattcgcgttttttttttttttacaggcaggcacctgtaatttcagctattcaggaggccaaggtgatggaatcagctgagcctgggaggcagaggttgcagtgagccgagatcatgccactgcacttcagcctgggaaattggagtgagatcttgtctcaaatatataaacatatatatataaaatatacatatatgctatctacacagatcacatagatatgctatctagatagcatatatatatcggatacaaatgccctataaatagcatatctatcatatatctagatagcatatatatatcacatagatatgctatctagacagcatatatatagcatatctataccaaatacatatgccctatatatagcatatctatcacatagatatgctatctaaatagcatatatatcacatagatatctatatatctataaatatcatatatatgctctctagataacatatatatcacatagatatcctatctacatggcacatatatatagcatatatgtcacatgtatgtgctctatatatagcagatatatatcacatatatatgccgtggaatacttagccataaaaaacagtgaaatcttgtcttctgcagcaacatggagggaactagaggccattatcttaagtgaaatgaccgagaaatagaaagtcaaaaaaactcatgttctcacttctaagtggaagctaaaccatgggtacacatggacaaacagagtggaaaacagacattggaggctcccgtaggtaggagggtgagaagggggtgagggatacagtactacctattggctacaatgtacactatttgggtgatgattgcactaaaagcctagtcttcaccactagaaaatatatccatgtagcaaaactgcacttgtatcccaaatccataaaaataaattttttttaaaggctcttaattcttctagggcaggtgagagatgcccaaaagttaaaaagtaaaccaataaatgaataagataatttcagatagcggtgagtgctatgaagacacgaaagaaaatgtaagactaagccaggcgtggtggctcacgcctgtaatgccagcactttgggaggccgaggcaggagaatcacgaggtcaggagttcgagaccagcctggccaacatggcgaaaccccgtctctactaaaaaaaaaaaatgcaaaaaattagctgggcatggtggtgggcgcctgtaagcccagctactcaggagactgaggcaggagaatctcttgaacccgagaggtgaagattgcagtgagcccagctcgcaccactgcactccagcccagacgacagtgcaagactctatgaaaaaaaaaaaaaagaaagaaagaaaaaagaaagagagagagagaaaagaaaagaaaagaaaacgtaagactaaaaaagctacttttgggtagtcaaggacaccaagaacccagccagcaaaaatctgaagactgcaaagtggccagccatgggagtattctacctgtgggaacagcaagtcccaagcttccaagtgtgaaggcgcttcggacaccctgaagctgaaagaagggccatgtgctggaaggtaacggcgagaggaatgcctggtgagaagcctggcccttcttccatgcttaccgacatgcgacagagtgtgacctggacagctggaagcgcttaggacatcctaaagctggaagaagggccatgttgctggaagcaacggcgagaaggatgctagatgggctctttctcaaggagtcaggatgccagtgcacttaggccaagttccaaagcaaagactccatcctactcctccccccacctctggaattccacctcccttgttgcgcccatcgctatggtgacgggcgctctcagtacactgtctctacaggccaggaaagagttgtgtgtctttggggtcccttccgctccgcctagggttcccggccaggccgagagaccaagcagggaccatgcgcgtgttggtacccccggctgagcgcagccaggacacacgcgttggggccccagcatggcgcgaggcagctcaggccatggcgaggaccgcgcacattctgaccgatcgctgcgggcaggaggcggtgaccatgtggcagcccaaggacagcgtgctggacccgaacgtggcccaccacctcggccgcgccgcctacatccagccctggcgcttccgcgtggagatgatcaaaggcggcggcaccttggagaagccgccgccaggcgagggcgtcacgctgtggaagggcaagatgaagccgcccgcctggtacgcccgcctgccgctacccttgcaccgcaaagcgcgcgccctgcagaccaccgaggtggtgcacgcgcacgcgcgtggagcgcgcctcaccgccgcccgcctcggccgcgcgcagcaccagattaacgggcgggtgcgacagctgctgcgccagcgcgaggtcaccgaccacaggctcagcgaagtgcgcaagggtctgcttattaaccagcagagcgtcaagctgcggggctacaggcccaagtctgagaaggtgggaccctcccccacgcccaaccccagcctaactgcaaagactgaggcctccgctatgcggtgtccagccccggggaaatcctttccatactttgggaggccaaggctggttgatcacctgaggtcaggaattcgagaccagcctgaccaacatggtgaaacccccgtctctactaaaaatacaaaattagccgggcctggtggcgcatgcctgtaatctcagctacttgggaggctgaggcaggagaatcacttgaacccgggaggcagaggttgcagtgagccgagatcgtgccattgcactccagcctgggcaacaagagcaaaactccatctcaaaaaaaaaaaaaaaaaatatttccatagagagaacacccaactccggtgaataagggcacaagaagatgagggccagatgcagtagctcacgcctgtaatcccagcactttgggaggccttggtgtgaggaccgcttgagtccaggccttccaggttgcagtgaactatgatggcaccactgtgttccagcctgggtgacaggtgagaacctgtctctaccaaaaattttaaaaagttagctgggtgtgttggtgcacacctgtaatcccagcattttgggatgccgatgcgggaggattgcttgaggccaggagttggagaccagcctgagcaacatagtgagaccccgtctctacaaaaaaaaaaaaatttttagtggcccagcatggtggcatgcacttatggtcccagctacttggaggctgaggcaggaggattgcttaagcccaagagtttgaggctgcagtaagctataatcaggccaaccgcaaaccagcatgggcaacacagtgagatcccatctctccaaaaattgcaggtaaattagccaagtttggtagtttgtgcttgtaatcccagcacttcaggacaccaaggcaggaggattgcttgaggccaggagtttgaggccagcctggacaacacagcaagaccctctctgcaccaaagtttaaaaaaaatagtcaggcatggtggtgcatgcctctagtcccagctacttaggaggctgaagcaggattgtttgagctcaggagttcaaggctgtagtgaaatatgatagggccactacacttcagcctaggagatagtgagactcaaaaacaaacaaacaaaaaaagatgatggatacaggcccaggaagagatgcctaagcccccaagacccaaagagtgagccctgcccaaggagatgagatcctcagcttccctgccccagaggagaaaattatccaaatctcccagccagggagagagggtgcagcccctgattcagactccttgaaaatctccccaaaaagtaaaacccacagccctcagcccaggcataaaatcatccacctagaccctaggcccagagggtaagacccttccatagatgtgagaccctcagtgccccagtcctagtgaaaacacactcccaactcccagctgaggagagcggctgatacccttgtcccaacccaggtgaaactcccccccagaatgttaaataaaacccaattcccctggcttcaggaagtgaaaatctccacccccaggcctcgtctgtggtgaaaggaagaagtcctccctacagagagagacttcagactcccaaccctcacacccaaaggttaagctcccatccagggagaaagagtaagacttctagtaccagtcctggtgaaatcttccccttaaagtgaaatctcaaatccccaccccaaaaggtacaaaaattcctgcctcccgggggagagatgagaccccacccacagaatgggattcctaccctcagcccccagatccaaatattaagactccaaaaacgtaaaccctcatcatccgtatgatatgatccctccacctgtagccagggagaggagataagaccatcactgaggaaggggtgcccagctcccagcctcagggggtgagaacaaccctcccccaagttgagacaccttcatctcagccccctgggctcctatctgtaaaagagagacgcccccaacctcaagctccagagagcaagacccgccaagtcagagagcccactgaaaagatcaaaccttctcaaagagtgagacaccccacccaaaggatgagagtaccctcaacttcatccttcaaactcagagtttatgaggctggcaaaccctctaccaccctggaaagaggaatctcttcccagccctttcttaacgatgtgagggattctctcctcgttttctaggtccctgacaaagctgacagtatgcttacatgggagaaagaggagctgaaaagcatgaagaggaaaatggagagagatatggaaaaatcagaggtcctactcaaggttaggggtgcctgtggacaagttacgggggctggagggggatccctggctgcctaatggacaaaccactctgacctggggactgtcacaatagcaattccttcaagccacactgaccagatattcactgcattttgctttgtgaaatggaaaaagggaggtcatgggagatgacgttgggtctcagaataacaacgaacaaccactctgtaccaaaccctgcgcagtcattgaatccactccttaaggctgtcctgtgaggcagaaactatgatttcctcaatagagatgggaaaattgagacccagagagagacctcacctaataagcaaagccatcagtgaaagcgctgtggtttcagcccaagtgactagagtctagctctttgcactctaacacgtgctccagcttcagccagacttgatctctcgctgcatccttcgcacttgcaatgagaacttcttcatgagggcacaaattaagggggaagagcagccagacttcagggggccttttggacctgttaaggttcgctggaaatttgtgtgctttcgactcatccttttgataaatactaatctggtacctgcttcccaggcaccaggcttggcatcatagataaagtggtgactgagaaagaactagccttgtccttgaagagttaacattctaaaggcattcaaagaaaatacaggctgggaacttgttttatttcctattgtgagattgaagtcttttattgttgttgaactttccttgcttttatgtatagatctcctcagctagactacatttaaaaaagcattggaccttgaaggcagatatagtactaaattatatttcacgtagcaaagctcagtaaggttgtgttgactggggagtggggaggaggggagaagaagggacaggctgggggacgagggtgtggacgaggcaggagactcagtgggggggcggggggcgggggctgctgaaacgctgtccgtggtgctgaatcggaatactgcatatcttctggccgctgtcatattcctttaaatctgatgattcctgaaatatccttccaggaagtcggaggcagagaagggagaagcccctgaggatggacgtgggagcaaagggctataaagagggaaatggatcatgcccataatctcagtactttgggaggccaaggcaggaggattgcttcttgaggccagaagttcaagaccagtctgagcaacatagcaagccctcatctatattttaaaataaaataaaactagccaggcacagttgcaagtgcctgcagtccctattcaggaggctgagggaggaggattgcttgaatccaggagttcaaggctgcagtgagccatgatcatacctctgcgctccagtctgggtaacagaggaagaccctgtctctgtgagagtgagagagagaggtgggaaaggacagatatagatagaaacagagacaggctgcttggcaggacctagtctgaatattgctggagaaaaatacttaccaccaatcagatttgtttcaacttaaaatcatgaagtcaaacctcaaattggcactcaaacctttcccagatacctcgccttaagtctctagaagacttgctgacctgctgggcaagtgatttcataacttctcttcctttagtcctctccagctccctgtgccttccttgctctacggtgatttcaatgaaaaccaccaaagggaacctctctcatttttcctctgtcaatcctataattccacccttccacccttctcctgcaccatcaacatttccttctctcttggctcattgtcaccagtgaacaaagggagaattattctttcatgggtacagatctgttgggatgatgaaaaattctggaggtggattgcaatccagcctggaagacagagcaagattctatataaatgaatgaaggaaggagggaaggaacagaacaggtaaaattaatctccaagtcagcttactggagatgatggttgtacgaatacacttaatgccactaaactgtacacttagcaaggttaaaatagaaacatgttatgtcatatctattttactacaataaaaagcccacctctcttgatctacatgcccctctagatacccatttctctagtccactgcatcttatctgcatatgtcaacttgctcatgttgactccaggcaggctcctcagctaaactgcatttgaataagcattggaccttgaaggcagatacagtactaaattatatttcatgtagcaaaactcagtaaggatgtgttgactggggggtggggaggaggggagaagaagggacaggctgagggtcgagggtgtggacgaggtaggagactcagggactggtggaacgctgtccgtggtgctgaactggacagctgtccttttttttttttttttttttttttgagttggctctattgcccaggctggagtgcagtggcgtggcgtgatcgcagctcactgcaacctctgccttccgagttcaagcaattctccgacctcagcctcccgagtagctgggattacaggtgcctgccagcacacccggctaatttttgtatttttagtagagacgtggtttcaccatgtgcgccaggctggtctcaaactcctgacctcgtgaccacctgcctcggcctcccaaagtgctaggattacaggcatgagccactgcgcccggcctggactgctgtcttgctggtcactgtatccccaccacctggcacatcgcctggcatcagtaggggtttaattaatatttgaattcatgaacaaaagactttttaagtctgctttttaaccaaatgaataaatcccaaagataccatattcagagaaagaagctggacataaagtgtacactctgtaggattccatttatatgaagttttagattcagcaagggttttcctcaaggtacagttagtaaatgctttcagccttgtgtgctgtgcagtttctgtcacaactactcaacttggccagtgtgccatggaaacaacgagaaatgatatgcatatgaatgggcatgactgtgtttcaataaaattttacttacaaaaacaggtctgccatccataggatggaaatttatcaactccttaacaacaggcaaaactcggctgggtgcagcggctcacatctgttatcccagcactttgggaggcccaagcaggagagttgcttgaggccaggagtttgaggccaggaatttgaggccagcttgcacagcatagcaagatatcatctctacaaaaatgtttaaaaataactgggcatggttagcatgcacctgtagtcctagctatttaggaggctgagctgagaggatctcttgagcccaggagtttgaggccacagtgagccaggatcatgccactgcaatccagcctgggagacagagcaagattctgtaaatgaatgaaggaaggaaggactaaaacaggtaaaactagtctccaagtcagcttactagagggggtcagggagggacagaggaaaggggagccagagaaatgtatggcatgatggaaatattttatatcttgatggagagtgtttataagggtgtatatatgtgcaaatgacttgttttgatataactctcaaataattgcaaatatcaaaggaatatgatatgcttcattttattgtggaggaagtaagatttcgatggcgggatgctgtccagatgagacacagcctggtgggaggggggaactcagagaatagcagtctcttaatattgatcagagcagaggaagggagacttcaaggctagaggtggggatgggatgagtgccagttgagaatcaagggggtgacacaggaagatcaagatgtgggtatagtgagtgccagctctccatgttacagtggggaaatgcatgagacaggctcttttctcagggtgccagaacagagccaggcacagaaaccaagcaattgacacccagcacagggaagctgttgctgtctcttactgctcccctcaccccacccccaaagagtcactgaaggcttctgaactgggtaaggaggcaggagatgtctgagcttcaacttaggaattgcttcttcccaagaacacaaacaagagctggaaaggggccgggtgtggtggctcacacctgtaattccaatactttgggaggctgaggcaggaggatcacttgagcccaggagttcaacactagcctgagcaacatagcatcactctgtctcaaaataaaagaacaggaaagggtcaagaatggagtgaggaaggaaaccaatttctcagaaccaatccatatcccagcactttgggaggctgaggcgggtggatcacctgaggtcagaagtttcagaccagcctggccaacatagcaaaatcctgtctctactaaaaaatacaaaaattagctaggtgtgatggcacatgcctgtaatcctagctactcatgaggctgaagcaggagaatcctttgaacccgggaggcagaggtttcagtgagccaagatcgcaccattgcatgatctgtctggaagtgagcagactcacttttacctgattattatgcacagtaccataaacagaagacaactttgtgaataaaaaagtgattttaagacatttctctagctgggcacagcagctcgcgcctgtaattccagcattttgagagcccaaggtgggtggattgcttgagcccaggagtttgagacaagcctggacaacatagtaagaccgcgtccctacaaaaattaaaaaaaaataattagccagtgtggtggcatgtgtctggtgtcccagctacttgggaggctgaggtgggaggatcgcttgagcacaggatgtccaggctgctgtgagctgtgatcatgccactgcactccagcctgggagactgagtgagaccctatctcaaaatatgtatatatatataacttccctggattacctgacatccaagtgaacacccatcacctgggaaaaatgtaagcagaattgcctgacccttgactcttatttccacgttcccataccttaacacaccttcccttctctaaaagccacgtttgcaggaatatctattcagcaccaccaactcatccatgtgtttatctgtaatggctattgaggaaactgtactgttcatggttgtttttgtttttgttttgagacaggatctcactctgttgcccaggctacagtgcagtggtgcaatcatggctcactgcagcctcaacctcctgggctcaggtgacccccccacctcagcctcctgagtagctggaattacagacgtgaatcatcacaccttgctaattttttgcttttttgtagagatggagtttcaccatgtggcccaggctggtcttgaactcctaggctcaagcgatcctcccatcttggcctcccaaagtgctggaattacaggcatgagccaccacacccagcctgaatgcagtgattttttcacagtgtgtttataggtcaaaacatcaagttgtacactttaaataaatacaatttttatttatcaattatacctcaataaagctgggaaaattaagtggaaaagaatacgttttaaatgaacttactacaaaaaaatgataagtatgtgagacgatggatatgttaattagtttgataacatccttccacattgcatacacaaatcaaagcatcacattgcatgccataaatatatacaattattatttttcaattaaaaacaaaaatttaagtaaaataataaagtaaaccttgaggggtggtgtgatgtgagtcaaaggaggaaaaagaatcattttttcataagatgtagacatgtctctcctaaaaaagattttgtgaaagaaaatatttatctggaacattggggaaataagttaaatcaaaaaatatttccaggccaggcacagtggctcatgcctgcaatcctaaaactttgggaggctgaggcaggaagattgcttgagcctaggagtttgagaccagcctaggcaacatagtgagaccctgtctttacaaaaaaataaataaataatacaaattagctgtctcaggaggctgaggcaagaggatcgcttgagcccaggaggttgaggctgcagtgagttacgattccaccactgcactacaacctgtgcaacatgtgtctcaaaacaaaaaaaaataatatatatatacccataagtaaaaacctttaccagtatcaaaaaaaaaaaaaaattaggcacactgcctcacacctgtaattccaacactttggaaggtcaaaggaggaggatagcttgaagccaggagttcaagaccagcctagacaacatagtcagaccccttcttcacaaaaagttttaaaaatagcaaggcatggtgctttactcctgtagtcccagctactcaggaggcttaggcaggaggattacttgagcccaggatgttgaggctctagagagctatggtggcaccactgcactccagcctggatgacagagcaagattttgtctcaaaaaaaaaaaaaaatgagagtgtcagtttccgtttagaggtagaaatgctttacagcctataaggctcaagcctgcagcagagaaatcacttgcatccacttccctcaacctcccagttctcactctgtcttctcctcccctccccacccagaccctggcctcctgccgagacactctgaacttctgcttcaaggagcggctccaagccgtggacctcatgaaccagcctctggacaaggttctggagcaggccagacgccactcatgggtgaacctctcccgagcccccactccacgcacacagggtcagaaaacgcctcctccagaccctgtgggcacctataacccaggtaggagtccactgtactgggtcgtattggtgcccacccagatccccttgactgtcagtgcagcccgtcgcccacttagctgtccctttcctgggaaatagccctagagtcaatgggaggactgaaagcctatcatgctgagcacacattgtcactcagcttttccccctgcactctcctgcccacactcgctgaggactcagtcattcacaggctctgctttttttttttttcctttgagatggagtcttgctctgtcacccaggctggagtgcaatggcctgatctcagctcactgcaacctccgcctcccaggttcaagtgattctcctgcctcggcctcctgagcagctgggattacaggcgcccaccaccacgcccggctaatttttgtatttttagtagaggcgggtgtttcaccatgttggccaggctggtctcgaactcctgacctcaggtgatccacccgcctcagcctcccaaagtgctgggattacaggttacaggctctgcttctaaggaaaccaacccaagacgcttcttacactatcccccgcgccccctggactttcacccagttcctcaataaaaccccctcgcccagggcccaccaccacctgagaatagagagagggacaggggctctgggaacggaggacttggcacccccacgcgcatcctgggcatttgcagcgtgcgccttggcgctaaacgaagccaagcggttgttggtcgagtccaaggacaccttggtagaaatggcaaagaacgaggtggacgtccgggagcaacagctgcagataagcgaccgtgtgtgtgcctcgctggcgcagaaggcgagcgagaccttggagctgaaggtgagcgcattacctgcggctgcgggccagggtgggacaggggaggagacgcggactgggagccagcgtgatccccctgcgcttccctgcccccaggaaagattaaatatgacgttaggactgatgaggggaactatcctccggtgtacgaaatataaccaagagttgtacaccacccacggtctcatcaaggtacggttcggggtgagagccttcgggggtggaggcaggggtgccggtggctggaggctgggtttcaatgcgcttgcacaccgcaccccaccagggtcctctgtcgaaagttcacctggagaccgcagaaaagctggacagacccctggttcgcatgtaccagagacacgtgggcacccaactcccggaggctgcgcgcctcgcacaggtaaaccccctcccccgtacccctctaggcccagccccgccaatggtaaggctccttcctcaagcacatctggaccaggtatgatccccctctcacccaagtcggcctgtccttcaactcctgccacgaagtggggaggcgggggcttcactgggtactgaagtgggtactggcgggggcttcagtgggtactggctcaaataagtcccctcaacccctgtcctcccccctcacacacaccctcactgtccagctctggccttagtctctctaacctgtaaaatgaggagcacgtcagcacccacttcaaatggtggtggtgaggacagatgagttcatgcatgaaaggtgtgtagcatggcacctgcatagaatacccttaaagctgcccagctgttattattaactattattgttattattatttgagacagactctcgctctgtcgcccaggctggagtgcagtggtgcaatcttggctcactgcaaccttcacctcccgggttcaagcgattctcctgcctcagcctcctgagtagctgggattacaggtgcgcgccaccacacccggctaatttttgtatttttagtagagacagagttctgctatgttggccaggctagtcttgaactcctgacctcaggtgatccgcccgcctcggcctcccaaagtgctgggattacaggtgtgagccaccgcgtccggccctgagctgttattattaagtacccttcctaaggaggatccttcctacacatcttgactagatgcattcccctccctcagcctgccctgtcgcggttttttttttttccaggcacacctggcccattcagatgtgttcccctcctcagctgtgttccttacacacacacctggcgcaggtgtgccttcccacgccaggtagccatctgctctggctcacgggtctgccctgctccctatccagggcaccgacaagctgcagtgccacatcacgtacctggaaaagaacctggacgagctgctcgccacgcacaagaacctcagctggggcctcaactgcaagaacatcgggcatgaggtggacggcaacgtggtgcgcctgcgcctgcgccagcggcaaccgcacgtgtgctacgagcaggcgcagcgcctggttaaggactgggacccgcgcacgccgccgccgcgcagcaagagcagcgcggacccctagtgaccccagcgtcccccgccccagccagctgattggatgctggctgggacctcggagagcagacacagccccatggccctccctctcccctgacgcaccctccctccaagcaccctctaggagaattataattaaaaataacaataattatcatgtattaggcacctactgtatgtcaaccacttaccctaggacacgttataagcgcatatcctggtagttaataggatggatttgggtgccagatggctgggatttaaattccagcttcccagtttcaagctgtgtggccttggacaagtcactgtccctctctggccttggtctctccaacctgtaaaatgaggagcatgacagcacccacttcaaatggtggttgtaggcggggcgcggtggctcacgcctgtaatcccggcactttgggaggcggaagcaggcggatcacctgaggtcaggagttcgagaccagcctggccaacatgatgaaaccctgtctctactaaaaatacaaaaattagctgggcctggtggtgcgcacctgtaatcccagctactagggaggctgagacaggagaatcgcttgaacccaggaggcggaggttgcagtgagctgagatcaagccactgcactccagcctgggtgacaagagcgagactccgcctcaaaaaaaaaaaattggtggctgtgaggacagatgagttcatgcatgaaagccctatagtatggtggctgcatagtatatcctcaaggcacctgagctgttattattggcatctccattttacagttgaggaaacaggcacagagaggctgtgcagcttgcccagggtcacacaggaagtagcaaaactggaattttcattccagactcaagagcctgcactctaagtggaacttctaggagctctgctctgtcctaccccatgtggtgtctggtcctgagcccagcactgagaataaagcagtgagcagggctgatgtggtccccactctcagggaggtcacaggttgatccagtgcagctaatgtcatccatttgggtgtggctctggttcaggtccttctgcttttccagtaggctcttggacaccccgccatcacaggacccctcacactgagctgtgattcttatctgctcttcccaggaagatccagggtgttgcacacatacagaaagaatgtgcattacagccacaggtatctcctaagcaactgctctgtgtcagaggctgtgtgaggcgccagggatacagcaaggatgtgtccctccgtcgtggagctcacagtgtatatgctgagaatggccttcacaaatgttggtatccttttggcaaagccagccaattgtatggacctaagcaccaacgtttagcagagaagaaaatgaagctcatttttcttctcattttcccagggttacacagccagagatgggtaaagcaagatttcaacctgtcatgctccacatctcaagcagggaccaggatctgaatgagtccccaaaacaagagaatggagattgggtcaattatggccactggacagaaaaacgcatgggcaaaaaagagagccatctgcccaggatgacagacctgggtaggagttcagctggggatcggctccattggtctgactcagaagcattgtgtgtcacagccagctcccttatgtcaagacagactctacagcttgggggttacaggcccccagtctccctggggctcagactcccacataaactattcttcttcaagcacttcttcccagtaccaatcaggatatcaacaagaaacagcacactccatttgcaagaagtttaagggccaggtgcggtggctcacacctgtaatcccagtacttagggaggccgaggcaggcggatcatttgaggtcagacgttcaagaccagcctggccaacatggtgaaactctacctctactaaaaatacaaaaattagccaggcatggtggcgggagcctgtagtcccagctacttaggaaggctgaggcaggagaatcgcttgaatcccagaggtggaggttgtagtgagctgagatcgccccactgcactccagcctgggtgacagagtgagactctgtctcaaaaaaaaaaaaaaaaaaaagagagagagagagaaagaagtttaagagaccacagttgatcctcattatccccaaatttacttgctaattcacttaccgaaatttatttgtcacttcaaaatcagtacttgtagtgctttcacaatcatttgcaggcatgcacagagccgtgaaaacatttttagccacctgatgttcacactgcccctctgagggcaaagaaggtgatgctgcctttttgtgccagctctcttaccataaacaagtgtccttgtggtagcctatttagcatctctgtctctctctctcttttttttttttttttttttttgcatttttgtgcattttgttggtggtttttgctgtttaaaatgacttccaggggttagtgctgaagtgctgtctactgtccctgagcacaagaaggctgaaatgtgtcttaggggaaaaatacatgcgttagataagcttcattcaggcatgcattatagtgctgtggccgtgacctccatgtgcatgaatgcatcacatatattaaataaggtgtctttttttttttttttgagacagagtctcactctttttgcccaggctggagtgcagtggtgcaattttggctcattgcaacctccgcctcctgtgttcaaacgattctcctgcctcagcttcccaagtagctggaattacatacacacaccgccacacccagctgatttttgtatttttagtagagacagggtttcactatgttggccaggctgctctcgaacttccgacctcaagttaacttccaaccacccgcctcggcctcccaaagtgctgggattacaggcatgagccaccgcacccggccaaataaggtctctttaaatagaaacacctaaaacaaggttatgtcttgattcgttgacaaaagggctgtgaccacaggctcacagaaacctaatcctgtatttccccatgagccatggttcagcgttcactgattcagtgtgcgtggtggctttatggaccattaccgcaaataacaggaattaactgtgtttgcaaaggtgtgggcagctagtagggaaacctcaaaggatagctagcataatatccacatgccagtgattgcggggagccttttccacctgtgggtctgaagggaaagggctgttagcagatgggagcatgtaactctgtgatgctgcagtgtagacgccgtgaaatgcccctacccacctctctgtccattggccagtgtccccgatgggccgaaccaccctgctgacttttgaccttcacgcaggtccttcccggagctgggaattatccctttaccctcacctttgcccatcttgatgcccagaaatcttgcataggaggcaaatgctccccttgcaagcaatgtcttgccctggggtttgcagcctgccaccctcaccttgctgtcaccgccccagtttgtgacctcagctcacacaatgtccccaaacagcatttgcacaattccccccattgcctcagagctgagatttcagctgctgccctagatgtgagtcctgtgcacccagcaagcttctccacgacaccatgaggtgggtgtcattatcccaaccttagagatgaagaaataggcccaaagcagtacaaaatgtatagatgccaccacccagcaagtaaggggctaagtgtgggctgtaaaaattgtaggcagggcaggcgcggtggctcatgcctgtaatcccagcactttgggaggccaaggctggcagatcatttgaggtcaggagttcaagaccagcctggccagcatggtgaaaccctgtctttactttaaaaaatgcaaaaattagctgcacatgttggcacatgcctgtagtcccaactactcagcaggctgaggcgggcttgaacccaggaggcagaggttgcagtgagctgagatcacaccactgcactccagcatggccaacagagcaagactccatctcaaaaaaaaaaaaactgtagggagtccccttaccccccaaaagtcctcctggctggacacagtggctcacacctgtaatctcagcactttgggaggctgacttagaaggattgcttgagcccagaaggttgagacaagcctgggaaacacggtgagaccctcatctctacaaaaaaagtttacaaaattagttgggcatagtggcccatgcctatagtcccagctacttgggaggctgaggcaagaggattgcttgagcccaggagtctgaggctgcagtgagctgtgatcacaccactgcactccagcctgggtgacaaagcaagattctatctaaaaaaaaaaaaaaaagtcctcccatacccctcaaacaatgatcaggtatcacctgcatgagaacacctacgtgcaccaggttccagggtcacactccagacctacggaatcagaatctcagaaggcaaagcacaaaaatccgcattgctcatgagctttctaggagggtccaatgcacaccaatgcttgaaatgcattgcctgctgttgctggtttcccagggctgacttctgcattgggcatagtaaacactaatgagagagcccacaaaaaatatttttattgtaatttctttctttttttttgagacagagtcttgctctgtcgcccaggctggagtgcagcagtgcaatctcagctcattgcaacctccgcctcccaggttcaagcgattctcctgcctcagcctcccaagtaactgggattacaggcagccgtcaccacacccagctaatttttgtatttagtagagacggggtttcaccatgttgatcaggctggtctcaaactcctgacttcaggtgatctgcccaccttggcctctcaaagtgctgggattacaggtgtgagccactgtgcccgacctgtagtttctttttaaatcagaagaaaaatatgaatataataataaatatatgacatactgcattgtatgttatttatgtgatacacaatttatattcatctctatactaatgtaggggtgtttttcacattttgggagttttggggggtttttgagacagggtctcactctgacacccagactggagtgcagtggcataatcatagctcactgcagcttcaaactcctgagctcaagtgagcctcctgtctcggcctcctgagtagctgggacgacaggtgcatgcccccatatctggctaatttttgtatttttttggagcgatggggtctttctctgttgcccaggctggtctcgaactcctggcttcaagtgatcctcccacgttggcctcccagagtgctgagattagaagcgtgagccactgcaccttgccttttcagcatttttttcattgtggtaaactacacacaacaaaatttaccctcttaaccatttttaagtgttcagttcagcagcattaagtaccctcacagtattgtgcaaccttcaccaccatccatctccagaactctttaaatcttgcaaaacagaaagtctataccctttaaataataaccgctcctttcctcctccgcatcccccagcccctgtcaaccactgataccatagataccactttctgtatatgactttgactgttctaggtacctcatataagctacatcaataaagttttacgtatttattttttgatggaagaaggaactcacaaaggtaaatgtgcctcaggcccataaaacccaaaatttggccctacaacttccccttaaaatattgggcacattcctctcattcatgtatttattttacttatttaatttatttattttttattttttgagacagattttcactcttgttgcccaggctggagtgcaatggcacgatctccactcactgcaacctctgcctcctgggttcaagcgattctcctgcctcagcctccagaatagctgggattacaggcatgcgccaccacacccagctaatttttgtgtttttgttagagacggggtttcgccgtgttggccaggctggtctcgaactcctgacatcaggtgatccgcctgcctaggcctcccaaagtgctggaattacaggtgtgagccactgttccaggccgacattgggtaaatatttaagtgaatacatgaacaaataaacagataaagtttgcagagtgttactgtgtgcattgccttatttaattttccactttagacctggaaagttcccttcgtaatcatccagttcaccatgctttgctgtcttccttattctctttccaattttcctggaaagtgagaaactgacatgggaagcaagcagcacagcatccgctgtgggagagatgcagacctgggcttgaccctttagagctgtgttacctcgggcaacttgctcaacctctctgaccctctgttttcgtgacctataaaactgtggatgggcggggcacggtggctcagtgagcctgtaatcccaacactttgggaggccgaggcaggtggatcacctgaggtcaggagtttgagaccagcctgactaatgtagtgaaaccccatctctactaaaaatacaaaagtagccagatgtggtggcgggcacctgtaatctcagctactcaggaggctgaggcaggaggatagtttgaacctgggaggtggaggttgcagtgagtggagattgcaccactgcactcgagcctgggcgacagagctagactccgtctcaaaaaaaataaataaataagataaaataaaaaaataaataaaactggatgataaaggtatctctctcatcaagttgctgggaggatccgttaaggcaatggggtttttgcatagtattccatggtgtatatgtgccacattttcttaatccagtctatcattgttggacatgcgttggctgggttggttccaagtctttgctattgtgaatactgctgcaataaacatacatgtgcatatgtctttatagcagcatgatttataatcctttacatggatgaagctggaaaccattattctcagcaaactatcgcaaggacaaagaaccaaacaccacatgttctcactcataggtgggaattgaacaatgagaacacatggacacaggaaggggaacatcacacaccggggcctgttgtggggtgaggggaggggggagggatagcatttggagatatacctaatgttaaatgacgagttactgggtgcagcacaccaacatggcccatgtatacatatgtaactaacctgcacgttgtgcacatgtaccctaaaacttaaaatataataaaaaaaagacaatggggtttttcatttagttcagggcctggcatggggggaggtctccacacatggtttatgctccttttgtttatcaaaatgacattcacataaaatgagccatcttaaagttagtggcatttggtaaattcacaattgttgtgcaaccaacgcctctatctagttccaaggtatttacatccccccaaaaaggagaccctgtgcccatcaccagtcactccttatttcactctaagaaagaccttactgcttctaaccatggaggccatgctttgcaaagcagtgagttccctggccaagaagcaatcaagcacgggctataatttttcagggagcctcatacaggactaaaacagtgggtgttttgttttgttttgttttgttttgttttgtttttttgagacagagtctcgctctgtcacccaagctggggtgcagtggtgtgatctcagctcactgcaacctccgcctcccaggttcaagcgattctcctgcctcagcctcccgagtagctgggattacaggcatgcgccaccatgcccagctaatttttatatttttagtagagacagggttttaccatgttggccagggtggtctcgaactcctgacctaaagtgatcctcccgccttggcctcccaaggtgctgggattacaggtgtgagccactgcacccggcctaaagtagtgtttcttgaccaggcgattctcccactactcttagggacatgtggcaatgtctggagacatttttggttgtcacaactggggatggaatatcttgctggcatctattgggtagaggccagggatcctctgaaatatcccacagtggacagggcagcttcctgccatgacaaagaagtcttcagttgaaaatgtccattgtatcatggttgagaaaccccacaccaaaataagataactcagaatcatcttcaaagtcaaaaactcttgaacaaagcctggaagtagagacagcagcatattgggattggttatttcagtgcattcttctttccatctatagggacactccgaggtctcatcatcaagtatttcttccacctaaaactctaggatatctgggggaatgagcagctctctccatcaagtccaaatgtgttgtgatatggtttggctgtgtccccacccaaatctcatcttgatttgtaggtcccacacttcccatgtgtcatgggagggacatcttacatggtggcaggtaagatgattaatttgctatagcttccacattgtattccaaaataactgtcccagcacccctcctcatgcctgtggtcagcagggagaaggaaggaggaaggaagaaggaaaagacatgttcctcccctttaagggcatgacctggaagttgtacatacaacttctgctcacttcctattgtccagtacttagtcacatggctacctgtagttgcaaaggagcctgggagacataatctttagcttggtggccatatgccaaactcatatttatataactctgccactagatgcagtatggatttgggggaaacttgaggttttcgtgacactcttcatccattaacaaagaatacttgaggctgcagacttgaggaaatgcttgaaagatggaatgaagagttgagtgatctagggatcaggttgaccatgaatgaagtagggacaagactttcagtcccaacaaagtatttagttgatggaattctgcagaggatggtgactcacgttctagaacctagaaatgggaaagggcccaatcacctcattttacaaatgaagctgctgaaacccagataggagaagcaatttcatttaggtctttcactgagtttgtagcagctcagggctaaaattgaggtccccgactccattctcagtgctctcttcacaactccattcatcctctagagctgtagactgagaaagcaaaccatgaggcttgtggctttgacatgaaggaagcaggacactgctagatccttgaggaggcatatcttggctaaggataggctgagagggcatggagaagccattgagacccgttgtggctatggaactatattctggccaactaaatgagagtagaagggatatgtgaaatattccagcaattcctttaagggaaaggagcatacttctttccccttcccctttcctctttcttcccaactagaacataggatgtgatgataggagctgaagcaaccactttgggttacatggtaaagatgtatgttcaggcaagcagagcaacaaaatagagaaagtttggctccctggtgattactgagcctccattccagctctgagctatctatctgtatttctgcatgaaagaaaaaaaatataattctatttcttaagtcagttacatatgtgtgtgtgtgtgtgtgtgtgtatatatatatatatgcgtatatatatgcatatatttctttgagacagagtctcactctgtcacccaggctggagtgcagtggcacgatttcagctcatgcaacctctgcttcccaagttcaagcgattctcctgcctcagcctcccaaatagctaggattacaggtgcctgccaccacacccagctattttttgtagttttagtagagagggggtttggccatgttggccaggctggtctcaaactcctgaccccacgtaatccacctgccttggcctcccaaagtgctgggattacaggcatgagccaccgcacccagcccagttacttatattctgtaagacttccaagcttataagtaatatatggggtcaggagggggcggattatttctttcagttccgacattgtgttagtagaagtccagggtcccctttgcctctccacctccagaggcataaccatggaccactaagcagctctctcctcccaccttccccagttcatcactggagtcatctactgacctaaccatatgtccctgcaaagcattgtatctctgtttggtaagacccaaaagggggtgatctgcctgcctcagcctcccaagttcaagcgattctcctgcctcagcctcccaaagtgctcggattacaggcgtgagccaccgcgcctggccagtgatccttgttttacagggtaagttctgagtgccagagggggctaggaagagcagagccatcttgctctgaaaagtccctgcatacttgtccagccttacccctcctccctctgtgctgcaggaaatattagagaatgtggattctggagtcagctatcggttcaaattgtgatgcgggtgattattaattgagagaccttggccaaactatttaaactctctgtgcctcagtttcccccatatatatttgttataataaagattcttatcttgcagggctgtgagaattaaatgagatagtgttccttaaagtgcttactacagcgcctagcagacagtgagtgagtgctccatcaacagagaggacaaatattgacctgagtcattaaaaggatcaaaggagggccaggcacagtggctcatgcctgtaatcccggcactttgggaggctgaggcgggtgaataacgaggtcagtagttcaataccagcctggccaaaatggtgacaccctgtctctactaaaattataaaaattagccaggcacggtggtgcacgcctgtatgcctgtagtcccagctactcaggaggcagaagtgggaaaatcacttgaacttgggaggcagaggttgcagtgagctgagatggcaccactacactccagcctgggtgaccaaccaagactccatctcacaaaaaaaaaacaaaggatcaaaaggaggaaggccaggtgtgattgatgcataaaaatgaaggagatcttacccagtggaagagaaagcaggtcagggacgtccctaagaaagctgacattaaagctgacatctgaagtatgaatggacatcagtcaggtaaaaaagagaaagtggggaagactcaggaaagcataacagcctgtgcaacggccctggagcaggcgggaaagcatgtgatgtgtttgggaagttgaagatatttttaagatggtggtggatgaggctggagaggtggctaggggctcaatgttgcaaatcagattcctctttgaatgtcatctggatgcctttttccttcatatttatttcacttgggacccctctttttctgtatatcctccttgctggaaagtcacattcttccaacagaaatctcattctcattgatgaaaaattctgcaatgcatcagtatacttgaagactcaaggactcttgtactgtcagacagcaatcctgggtacccagtctttatccacagattcttaaagaggtttccccactctggggcacttgcaaagtgcctggcctaatcgaagccttatacattgaggaaagtcttctctgggtctgatttgagcagtcttgaatgtacttatctccttcggttctgacactaccacctgtagtgattggaggccaatgtggagaagttcgattccattctgtttggagaaaagacttgcttgaggacagaggcctgcagggctggctcctgcctttctccattcaaatcttgggccatcccctgggcttggtggctcatacctgtaatctcccagcactttgggagaccaaggtggatggatcacttgaggccaggagctcgaaaccagcctggccaacatggcaaaactctgtctctactaaaattacaaaaaaaaaattagcccagagtcatggcgggtacctgtaatcccagctactagggaggctgaggcacgagaatcgcttaaacccaggaggcagaggttgcagtgagccgagattgcaccactgcactccagcctgggcaacagagcgagagaaaaaaaattggggcggccattcccccatcacccttcccattggcctcctctccagctacagggattttgttcatgtttgttctatacctgggccaccctttctcactcccccttggtcctacacctttgcccagaaaattctcactcaagcatgtctcctcctccaggaagtcttagtagtggagccgtggcaggttcctttatgttctcaaagaaccggcttctctccttctgtgtgcttatctcagctttcaaatacatattcattcacgtgactgttttgctaatgattgtctccccccagtaaacttaaggtccatgacagcattttttccactatatctgccacaccctggggcatagtaggaagacaataaatgttagcaggaaggagggaagaaagggagagagaaggaagaaaaaaaagaggaaggaggaagagaggagaaggagggagggagggaaggaaggaaggaaggagaggaggagagaatgaaggaagaaaggaaggagggagggagggaaaaggaaagaaaagaaaaggaagagaggaagagaggagggaagaaagaaagcaaggaaggagggaggaagagaaggatggagggaaagaggagagaaggaaggaaagaagaaatgaaggaaggagaggagaaaggaaaaaaggaaggaaggaagaaagggagggaggaggcaggagggaagaaaggaaggaggcagggaaggaaaggagaggaagaaggagggaaggagggaaggaaggaagagggaagaaggaaaaaagggagaaaggagaaagggagggagagaatgaaggaaggaaagaagaggagaaaggaagagagaaggaaaaaaggaaggaaagaagggagggagggagggagggagagagggagggaaggagaggaggagaccttctcgaggtcagtcttttgggggtctgatttcacatagacattttccacttctggcctttcaggttctagaaggcctctacatctcatcaatagattcccttagattcacaatgccccatcagttgatacgttgttgaccacagtggactttcatttcatcgttctgtggagaaagggcctggggcaggcaattctgctgaaacctctcttccagctatcattttctacccaagcaccctttcacatactctctgggattctctcactcgttctttcctatctctttcctcacccctttcttgaacacagaaacatgtttgtgactgttcattgcaagagtaaccaccgttgccatttctgcttgttcgtggaactaacacacaataattattcctctgtcttcatctcctgcctcattaacacctcagtgattacaggcatcattaattgctattaggtcatctcatcccacggtggtgtgaaccaggtcctccctgaagacttggcccagcttatggatagtatcggtttatggccacctcctttcctccaccttcatcatgaaaaagatctgcaacacacacaccacgcagcttccaaaacaccagccggctgaccagagacaacctccttgtggacactaaagaggcggttgtcctggggtgtgacgtgggcctttccaggtcacacaaccagctagtagggatttattaggagtctacatctgctccccaggtcacagatattggacatctcaactagggcacagaaagggatgttggagagaaaaggatgaagtcaagaagtatttagggagtaaaatagaatgcttcctagatgacagaaactcttccaagtgttttagatacattaacccctcatcacactccagtaaagtggatattactatcgcttctttacaaataaggaaactcagccaccaaaaggttacataattcagaatttgagtcactagggtcaggaatccaacccagaaagtctgatttcaaaggatacatttttaccgttgtgctgttgtgccttccattcaattatctgtttgccacagaatgaaaattcctcacttgcatttgcatctcttccacctgcacccctcacaccacacacacgcacgtgcacacacacacaatctatagcgacttggtagggatagaagcaatatataaatggtcaaaagatgcaccacatcagagaacgcagatgtgcagccttgcatgctaaggtgagagagggagaactgcctttgttaccaaacctgcttcagttcccccagagcagctttgacaaactcattcattctgccaaactcatgtgagcttctcaggatggacctagagagtagccaaacatttccttcatttctttttcatggatcccatccttgggccataaaggaagggaaataagaagacttgggagttccagagagctgctgtcagagcccagctgcaacgcttgggagccaagttatttaactattcttaaacctcacttttctccatgcagttgcacagctgttgtcgggattagcatttctatgcttaaaatgctctaagtcctcactcttgtaatcccagctctctttgagaagccgaggtgggaggattgcttgagcccaggaggagttcgagagcagcctgggcaacacagcaagaccccttgtctatgaaaaagaaaaaaaaatgctctaagtgaatgaagagcatctctcaatcctgtgacttaggtaagcgaaggtcagtaaaagaatacgtatcgcacctgaaatataggtattctgtattgactgacagcttccgtgtatactttatataaattttgttttgaaaagtgacatgtgtgatatgcattccttgccttgatgataaatcaaccccccttcttcacagagctgagttgcaagaatagttgcaaatgcaatcaagattttcatcccaatacaacaacaactactactgctggtatgactgctactactaaacgtattcgaattttttaattgtgcgtgcacatggcaacagacacccagaaggaacataaaaaatcagatgaagtaaaaaaaataaagaattatcttggggattgcttgagaaattacagctgcacagctgggctctccattgcattgcaagctcaatggcttgcaaaactttcatactttcaggaagggaaggaacacctggggtgcttggatgtcttcccagattgtggagaacaaaatcctgcctgacaagatgctgtctcatcttgtcgctggcccatggattgtttaccccccaaggaagcccagaatgatgaaaagttgccaaagatctttgagcaacaccacctcctttcaacactgtgatgagctttcacttctttaactcccaacaaaagcaaagggggccccagaggtcaggacctgagattcagagagaagcatgggctggtgacatagatgcgaatatggactccaggcagagaaacagcactgtggctaagaagatgaattcatggatgtgcccagggggcaagcatgaacaatttagatacatggccattctctgatggtgtgtgaaggcagaagatattcaccacgactgtgaactctcaggaaaatcatgcctaggaagcatgagcatgttcagtgaaacatatgcacttgctcttctgcaaaacaacccaagagatttgggctgcttggagacggggagccctcacccacattgactttcaggcttaagatgccattgctggttttgtgttttggttttgttttgttttgttttttgtttttgagacggagtctcgttctgtagcccaggctgaagtacaatggcacaatctcggctcactgcaacctccacctcccaggttcaagggattcttctgcctcagcctcccgagtagctgggactacaggcatgtgccaccacgcctgggtaatttttgtatttttagtagagatgtggtttcaccatattggccaggctggtttcaaactcctgacctcgtgatccatccgcctcagcctcccaaagtgctgggattacaggagtgagccattgcactcggcccattgctgcttttttaaatgagtaatagtatttttattttaatgaataatagtattttatttctttttttgaatttgtcaatttttaaattgacaaataataattgtatatatttatgaggtacaatgtggtgttttcacatatgtctatattgtggaatgaataaaccaagctagtaaacatatcatctctccttttttttcctctaataagaatatttaaaatctactcttttttgaagtctagatatcaccaaaaaaaatttaatgtttaaaaattgaaaaaatatagccaggcatggtggcgggcacctgtaatcccagctacttgggaggctgaagcaggagaatcacttgaacctaggagacggaggttgcagtgagccaagactgcgccattgcactccagcctgggtgacaagagcgaaactccatctcaaagaaaaaggaaaaagaaaatctactctttcagcaattttgaaatgtacaatattattaactatagtcaccatgctgtacaaatcttagatctcaaaaacatataagttctagtgctctaaagcactgtggggtgaccatagctaacaataatttattgtatattttcaaatggctaaaggagaagatgttgaatgttctcaacacaaagaaattatatatgtttgagatgatggatactctaatcaccctgattcgatcattgtacattgtttatatgcatcaaaatatcgctgtactccataaatacatacaattattatgtgccatttaaaaataataacaacatagaaagacacctgcctctagtaaaaaattaaaaaataaagctgaggcgggcagatcgcctgaggtcaggagttcatgagcagcctggcaaacatggtgaaaccccatctctactaaaaatacaaaaattagcctcaaaaataaccccatttctactaaaaacacaaaaacacacacaaaaaatccagcctgtcgcccaggctggagtagctgggatcacaggtcaaatactattcagcctttaaaaggaggaaattctgtcatttgccacatggatgaatttagagagaacattacggtaagtgaaataatccagacacagaaaaacaaatactgcatgatctcacttatacatgagatctaaaaaagtccgactcgtgaaagtcgagaggtagaatggtggttgccaggggctggggcaggtaatagggagatactgatcaaagcatacaaaatttcatattatgttcttttgtttttttttttttttttttgagagacagggtcttgttctgttgcccaggctggagtgcagcagtggtgcaatcatagctcattgcagcctcaaattcctgggctcaagcaatcctcccacctcagcctcctaagtagctgggactacaccactcctggctcatactgtattcttaaggaaggacgtggtattatttccagtttatatctgtagagcatctgtagagtgaaggggcagaagcatcaattctgacaacttcaggcctttgctcccaatgcacattgaacatttttcatgtgtcatgctgggtgctgcgtaaacacaacatgcatggctcacactctcactggctgactgtctttgggagaaagaagatatcaaaggagatttataagagtaaaatgacttcccaggagaagtgcaggcagccacagtaatttggaaccacctggtccatgaagcgttcagcagaagcttcctccagaagcttcgttttacttgagatctgattaatcttttttgtttttttgtttattttactttaagttttagggtacatgtgcacaacgtgcaggtttgttacatatatatatatgtgccatgttggtgtgctgcacccattaactcatcatttaacattaggtatatctcctaatgctatccctcccccctccctcccccctcccccaccccacaactggccccagtgtgtgatgttccccttcctgtgtccatgtgttctcattgttcaattcccacctatgagtcttttaacaaccaagagtccttgtgtcactctccagctctgaattcctcaatggctccccattgcctatttggatcagggaccaccttattcactttgcctaggacttccctggcttcttagcagtgaaatccccacatgccagaaaactctgcagatctgggcaaaccaggacggttggtaaccctacaacccaaccaaattcagactcccttaaagtgacttcaagccccttcatgatctcaccctttcctggaatcacctctcaccatttggactcacttcccatcaccaggactcatctctcaacaaagggactctcctctcatcactgggctcacctctcaccaccagaactcacatctcaccacctggactcactgtcacctcctggattcacccatctggactcacctctcatcacctagacttatctctcaccccctggactcacctctcaccaactagactcatcccttattacctgtactcatctctcaccagctggactcacccacctgggctcatatctcaccacctggactcatctctcactacctggactcacctctcaccacctggactcacatctcaactgaactcatctctcacaacctggactcacaactcaactgaactgatctcttaccacctggactcacctctcaccacctggattcacctctcaccacctggactcacctctcaccaactggactcacctctcactggactcatctcttaccacctggactcacatctcaactgaactcatctctcacctgaactcatctctcaccagctgtactcacttctcaacacctggactagcccacctggactcacctcatctctcaccttctggactcatctctcacctggagtcacctcttaacaccgggactcacctctcacctggacttacctcccaccacttggactcacctctcaccccctagactcacctctcacaccctggactcatatctcaccatctggactcacctttcacctggactaacctctcaacacctagactcatctctcaccacctagattcacctcgcaccactcggactcatctctcacaacgtggaatcacttctcaccacctggaatcacttctcaccacctagactcatctctcaccacctagactcatctcccatcacctagactcatctcccatcacctgaactcacctctcaccacctggactaactctcaccaccactgtctcttacactttattctctggccatgtggaaacagacatggtgccttgcattcaccaagctcactcattcacctctgctatttccccatgttgggacccctctgcactggctacctctcccacatgcccacctgaaaagcacctactcattcctcaagtctcaggtgacatatacctcctctatgaagccaacttgtaaccatgtaaccactttgggagtcaatgcatgcattcctccatggagtccttacaccaggttgcctttcttggaccagccagttgccagataactctgattaatataattaatcaatttaattacttaattagttaactcacaagtactccagcccatggtgacgcattctctcacatactgatactgtgtaaatatgtgtctcatcagaggagacaggatctcccgacatttcatcatcattggactgaggagaaattcatgaggaaccatctctgccaacctccattttaggagacaaaactaaactgggcatcccagtacactcatccacccagttcttccttcttgggccctcactgtgtgcctggttccaaatgaaacactcaagcacagccttcaacccaagaactgggcagtctaaacccacctgcctccacacaggggcaggggctgcctcagaaatgccctttcaatcctgggctaatccaaggctagttcttcccaactctgcattcagtgatgccatgtttgtaacttgaaatcagctacagcaagagtgaatacatcatggaaattagcaacattacaaatgaggacattttttgctttttattgtttgggaggttttttcattttccttcctttttttttttttttttttaacggagttttgcttttgtcgcccaggctggagtgcaatggtgcaatcttggctcactgcagcctctgtctaccaggttcaagcaattctcctgcctcagcctcccaagtagctgggattacagatgcataccaccacacctggcacatttttgtatttttagtagagatggcgttttatcatgttggtcaggctggtgtcagactctgacctccaatgatccgctggcctcggcctcccaaagtgctgggattacagatgtgagccaccacgcctggccatcctctttattttttaattgacacataataattgtacatattcatggagtacatagtgatgttttgaggcatatgacatacagtaatcagatcagggtaattgacatgtcaatcatctcaaacacttatcatttctttgtgttgggagcatgcaatattctccttctagctgtttgaaactatgtaatatattattgtttactgtagttaccctacagtgctgtagaacactagaacttattcttcctacctagctgtattttttggtggggagatagagcgggggacaagggcaagtaaaaatgccataaaatgtttctaccattttgaagttacctttatctttctttttcaatttttattttaaattcggtggtacatgtgcatatttgttacatgagtttattaatccatttttatactctataaagaaatacccaagactgggtaacttataaaggaaagaggtttaattgacttacagttccccatggccggggaggcctcaggaaacttacaatcatggcagaaggggaagaagcacgtcttacgtggtagcaggagagagaagtgaagagcaaagtgggaaaagccccttataaaatcatgagatttcaggacagctcactcactatcacgagaacagcatgggacaactggccccatgatccaatcacctcccacgatgtccctcccccaaacctggggattacaattcagattacaattcaagatgagatttgagtagggacacagagccagaccatatcagtggctacactacatgatgctaaggtttgctgtatgaatgatcccatcactcaagtagtgagcacaggacacagtaggtagtttttcaaccctcaccccctctcctgccctcctccctctagtagtcaccagtgtctattgtttccatcttcatgtccacgagtagtcaatgttttgctcccacttataagtgagaacatgtggtggttggttttctgttcctgcattaattcacttaggataatggcctccagctgcatccattttgctgcaaacgacatcattttgttgttttctttccttttcttttcttttttctttcttttttttttttttttttttgaggcagagtgttgctctatcgcccaggctggagtgcagtggcacggtcttggctcactgtagcctctgcctcctgggttcaagcaattctcctgcctcagcctccccagtagctgggattacaggcatgcgccaccacgcctggctaatttttgtatttttagtagagatgaggtttcaccatgttggccaggctgttgtcaaactcctgacctcaggtgatccacccacctcggcctcccaaagtgctgggattacaggcatgagccacgcaaccagccatgattttgttattttctatggctgcatagtattccatggtatatatacacacaccatatatatatacaccatatacacacatacacacacacacacacacacacatatatatataacacttttctttatccagtccactgttgatgggcgcctaggttgattccatgtttttgctgttgtgaacagcactagctgtaattttgtatcctttaacaaatctctccctatcctctcttccccctaccattcccagcctctaacatcctctgttccactttttgcttttacaaaatcaacttatttagcttccacacatgaatgagaacatgtgctgtttaactttctgtttctagcttatttcacctaacatactgtcctccagttccatccatgttaccacaaatgacaggatttcattctttttatggctgaatagtattgggggatgttgatttgttgtggttttttggcttcattttgtcttgtttttagagagcgaagtgttagacatcttccaacacatcattgcaaacactccgagtcctgactgattcccctaagatccaactttcttaacggaccagaccctgtcaaacaatgagatttcaaggaggaagaagacagcaaaagcatgctttagctaaaattttggcatggggtaagtgtaggatgttatgtccagtttaatttggtgttttcctgggttttgtttctcttttagtgaaaagtgtgtactttttatgccattgcagaattgattcaatagcaccactgaattgtcggtcacgtggatatgttcagtttgaaaaaaattatcaagctgcacatttaagagttgtgcactaggccgggtgcggtggctcatgcctgtaatcccagcactttgggaggccaagagggacagatcacgaggtcaggagttcgagacaggcctgaccaacatggtgaaaccccatctccactaaaaatacaaaaattggccaggtgtggtagtgagtgcctgtaatcccagcaactcgcgaggctgaggcaggagaatggcatgaacccggaaggcagaggttgcagtgagccaagatcacgccactgcactccagcctgggtgacagagcgagactccgtctcaaaaaaaaaaaaagaaagaaaaaaaaagagtcgcgcacttttcttcacataggttattctcaatagttgtttaaagaacacaaaaaaattgagtttgttccatatgtgctaacatggaaagatgacccagacataattcggtgaacaaggcaagtaacaggacaattttgtagaacgggcccacctatgtaactaacactgcgaatgtgtgtaagtcaatgcggcaataggcactgaagggaaattgctcagtcttgtgcctgggctacctggaagcaaagggaagaattggaaggatgagaacaggccagttttgctaaaaaaaacatttctgtattgctagaaagttgcactactaggaatggaattaaaacatgcatcaggctaagcgtggtggctcacgcctgtaatcccagcactttgggaggcccaggcaggtggatcgttttcagctcaggagtttaacaacagctgggcaacatggcaaaacccagtttctacaaaaaacacacaaaaaattagcctggcatggtggtgcacgcctgtagtcccagctactggggaggctgcggctggagaattgcttgagtccgggaagcagaggttgtagtgagttgagatcataccattgcactccagcctgggcaacttagtgagaccctgtctcaaaaaaaaatccacataaaacttgtacataaatatgtataacagcatccttcaaatagccaaaagcctaacacaactgaaatgttcctccacagatgaataaataaacaaaatgaggtatatctgtacaatggactattattcagtcagaaaaagggatgaagttctaatatatgctaccatgtggatgctatcttcctcctccttgaaatctcattgatttataggatctggtcagctaagaaggctggatcttaggggaaggaattggaatgggagtgtctgcaatggtttgctgaaagacatctaacacttggctctctaaaaaccaaaacaaaatgaaacaggagacaacaaaccaacatccctgcaatactgttcttgaaaacatcatgctgaatgaaagaagccagacacaaaaatcacatagtgtatgattctatttctgtgaaatatccagaacagggaaacctgcagagacagaaactcggctagtggttgcctaaggctgggatgtatggagagattgggagtgatagctaaagggtactgggattcttttggggggtgataaaaatgttctaaaatgagccaggtgtggtggcccgcgcctgtaatctcacactttgggaggccgagtggggaggatcccttgaggccagaagttcgagaccagcctgggcaacacagcaagactttgtctctacaaaaaatcttgaggaaaaaagtagcaaggcatgtacgtgcacacctgtagtcccagctgcccaggaggctgaggtggaaggatcgaataagcccaggagttttaagctgcagtgagctgtgatcgctccactgcactccagcctgggtgacagatcttatctccgaaaaaagaaaaaacaaaatgttccaaaatgaactgacgcaatggttgcatcactgtgaatatattgaaacccactggattgcacacttcaggtgggtgaattgtataatacgtaaattatatctcatttaagctgttgctatcgaaccgagtttgttcttcctctgtgcagcaagccaatcaatgtaatgacagattttgcagaagaggaagagttcgttcatgaggcaattaagcgacgaggtggtaaaacaggtctcaaattctcctccccaaaaatagggtttgagggtgcttatgggatagaaaacggggtgatctaaagtacggagaaaggtgactggcaggtagggaaggtgaggtaatcagaatttctgagcaagcatggttgagctacatggctttagataggacatttgtgcaaaaaatagcatttagcatgatctgaaggtggagtttacggccctctgatatcagctacccacataggtgcagttgaagggtcagtgatctccactggcttaaactaaacaagagctgcctcctacctagttcctgaaaaacaactttaagcacccattactatagtgtcccacagacaaaaatgttatctgtaaggaagccagtgggagtttagttatgcattatttggctacgtgacttgctagtggcgcttttaagatcaactataagtaagcaattaaaagtaagtaagcaattaaacgcaaggcagattaagtctggagggcttaatcaggttcgcctttggtttcactattaacataagaaataaaatgaaacaaaatggctgaaaaataataagaggaggaggaagagaggaatcatcatgatgcatcagttaaggcaactgggctggaacattttaggggttgtttgtttgtttttatatttaagacagagtcttgctctgtcacccaggctggagtgcagaggcacaatcttagctcgctgcagcctcaaactcctaggctcaagccagcctcctacctcagcctcctgagtagctaggactataggtatatgccatcatttttattattattattattttagtgacagggtctcactatgccccggctggtctcaaactcctcacctcaagcgatcctcctgccttggcctcccaaagcgctgggactacagacgtgacccaccacacctcaccccttatagggttgaatgccaactgtgccaattgctgaccttgggcagtcatttcacctctatgagcctcagtttctccatctgcaaaatgggagcaaaaatactgatctgtctagactcttgaagactcgatgagataataactaagtgaagtcggtgttatctacacagtggaaggtgagatgaataaactaggcataatgatgatggtaataaccagatgggctggctatgggatgggggttgggagaggttgtggctgggctggcacagacatctgactcatttagactctctgcctaggccacctttgccagagggagtcccctcagccttgcgatcactcatcccattggcgttggctccatttccacaccacagctgtgtgccaagggtgtgtcatgaggtttcttgagtgacagaaaactcaccgacaataaagggccaggtgattgtgccacccgattcatagaccaggcttctcaggagaaaccccgggagattccacactgtcagccccttctccaagatcagtacgtgggcctgactcctcctcggtgcccagctcagtattggcaactaggagagtagtgagattgaacttggccttgaggaacagctgcctctagagttggtaagtgatttggtggatattagcctctctctctctctctctctctctctctcacacacacacacacacacacacacacacacacacgcacatacacacatacgctccctctcccttcatgaattaatgctctggccagttttggcagaatggaagaaatttccatccatcccctctttcttttcatctgttcatttttttcttatttgtttactcagcaaattctctccaacaccacctctgtgctccctgccacactgttggccatgatggagacagagataatgaagtcaggctttcagtcctgaaaactgagctgccagttcagccatgagagtaagaatcaaaaacactgctgtaattcaagtaggagcaagcagagctgtgagagtccagagaaggaagaggaaagttccaggaggtcaagagggatcctaaaacctacctgggtcaccattgctgttaagcacctagagctctccccaggtcctttgcggatgggaaaatcgagtctcagagaggagagtgagatgccgaaggtcacacagctgggaagggactgaggcaggattcggttctggctccagggctatgctccttccacttcctccctcacaatctttggctcctctttcgtcacagcacttgctgtgtgtgtgtgtgagtgtgtgtgtgtgagagagagagagagagagagagatttaatattcatttctgtcacagactagagctacagaaggacagaaagtcagggagcatgtctgtcttacttaatggattctaagtgcataacacataatagatacccagaaaatatttgctgggtaggtgggtgggtgggtggatggattgatggatggatggatggatgggtgggtgggtagatggataagtaaataggtggatggatagatggaagatagagatgatggatgaaggaatggatagaaggagggctagatggagggatagttggaagatagaatagatggagggatggaagacagagagagataatggatgaatggatggatggatggatgaatgaatgagtggttggatgaataagtggatggatagatagatggatgggtagataaatgggttgatggaagaatgaatgggtatatgggatgactgattaatagatgggtagacagacggatgaatagatgtgtgagtgggtggatggatggatggatgagtggatagataggtaagtggaaagataaattggtggatgggttgatgaataaaaggatggatgttaaattggattgatggatgactagatagatgtgcgggtggaaggatgggtggatgggatgactgattaatagataagtagatggacagatgaatagatggaagggtgagtgggtgaatggatggatagatgatgaattaatggatagatggtagatggatagatgaatgaattgatgggtgactggatagatagatggataaaaacatagatgaatggatggttgatgggggaaggcatagcagatattatgccaccaaaattgtcagagaaggatctagatagaaaaaaaaaaagcattcccggtggggtgcagtggctcacatctataatcccagcactttgggaggctgaggtgggcagatcatgaggtcaggagatcaagaccatcctggctaacacagtgaaatcccgtctctactaaaaatacaataaaattagccaggcatggtggcgcatacctgtagtcccagctactcgggaggctgaggcaggatcatcacttgaacccaggaggcagaggttgcagtgagccgagatcatgccactgcaccccagacagcctgggtgacagagtgagattctgtctcaaaaaaaaaaaaaaaaaaagcaaaaagcattccctactgaggagaaagtgtaggaaaaggcaaagagatggggaaatgccaagagtatgacaaaagtctgtctgtgcagccagagaagagaacaggactcagagatgagaatggagaatgtggacagacattcagactcaaggaagagcaagggaggtggattgaccccttcgtattggagacccagtgagataatatcaaagttgcattccccacttcgatgacattctccttttaaacactcctccaaggcatctctttgagatggcttccccagcccgtcatctcctaggtagaagaggcaaacacatgggtcacttgccctgctcctcattccagggctttcaggggaagttcagtccaccagaagctggtgaatgacccacgggagacacaggaagtttttgggggcggagtgggggacattgtggggtaggctcagcagttctgaagaagacatccagaaatggaagacatcgtgaaattgtcattctaggggtgatatattactacttcatggattatcatctattgcccagatctgtccacagaccaaatccccaccacttgagtgctatttggtctcaaaaatccagatacataagccagtttgtcccctgagcccctcggcctccctttagagaactttaacctatcttctcttgactccaaggatcagacaagggtgctgagagccgggactcacaaccaaaggagaaatgagcaatccgcggtctttggaagaggtaggctgggtgcaggttgaggggagggtgatcatctggggagaaggaaggtgaggattttaatgttttggaaagagtggagggactgaaaaaatcatgatctgaactcagagctaggaggtactttgtagtcaatcaaacagcaaaaaaagactcagagatggaaccgaagttgggttgggtggtgggggcagtcaaacacagctacctctgtctccaaagatcaagttcttctcaacacattaaaggttctgagaagtcctgcaataaacaatttcatgttgattttttaaaagatgaagttcttaccactggggtgctcagtacgctgcttctgttctggaaagaactgttgacccccaatattcttcttcctcagacgggatctcagtattagcttcagaaactctgagacctctgcaagtgaggaggtaatagaggaatgctcagaacactcttggggaggatgaggagacctgcaaatccacaaaatacgacaactggaagggatcttcaaaatcacacacacactcattgtctatatttggaaactgaggctcagatgggagcagtgacttcccccaagttcataccaagctagaaaagagctggaccccaggttgggttgctgtatttgggaactaaaaataaaggacacccaattcaatttgaatttcacatcaacaacaaataattatgtagtataagtatatcccatgcaatatttgggatatacttatactaaaaaggtatttggtttttatttgaaatttaagtgtacctgagcatcttctattatacctggcaaccctaagcccaagcctctcttgttttgtttgttcatttttgagacagggtctcacttattgcccaggctggagtgcagtgacaagatcatagttcactgcagcctcaacttcccaggctcaagctatcctcccacttcagcctccaaagtagctgggaccacagatgcacagcagcacacccagctatatttttcattttttgtagagacagagtctcactatgttgcccaggctggtctcgaactcttgggctcaagcaatcctcccacctcggcctcccaaagtgctgggatcacaggcatgagccaccacacccagcctgcatgcctcttttgactacatctgcttctccttgaacctctccatgctgatttctgtcttctcttggccccaggagaaatatgatatgtcaggtgcccgcctggccctaatactgtgtgtcaccaaagcccgggaaggttccgaagaagacctggatgctctggaacacatgtttcggcagctgagattcgaaagcaccatgaaaagagaccccactgccgaggtattggggtgcctactccaggcctgtttgggggaaaggtactaggttggaagtgtaggctatggggacccagctgagtctggttcttcctctcactccagcaattccaggaagagctggaaaaattccagcaggccatcgattcccgggaagatcccgtcagttgtgccttcgtggtactcatggctcacgggagggaaggcttcctcaagggagaagatggggagatggtcaagctggagaatctcttcgaggccctgaacaacaagaactgccaggccctgcgagctaagcccaaggtgtacatcatacaggcctgtcgaggaggtggggacagatccaagagcacagagtctgtggtttgttgtttctgttttgttttttgagacagcacccaggctggaatgcagtggcggaatctcaactcactgcaatctccatctcccaggctccagccgtcctcctgcctcagcctcctgagtagctgagactacaggctcccgccactatgtcaggctaatttttgtagacagggtctgattatgttgcccaggctggtctcaaactcctgagctcaagcaatcctcctgcctcagcctcccaccatgcccaaccaagtctgtgtttttatccaagccagtcccagatccaaagccccagctgaagccaggcaccatggctcatgcctgtaattccagtactttgggaggcccaggcgggaagattttttgaggccaggagttcaagactagcgtcgagcaatgtaacaagaacccagctctatgaaaaatattaaagattagccaagggcatggtggcatgggcctgtggtcctagctactcaggaggctgaagtaggaggatcacttgagcccaggagttaagaggctgcagtgagctatgattacaccattgcactccagcctgggcaacaaagcaagcccctgtctctaaaaagttaaattaaattaaaaagccccactgcacatggcataccacaaaagcatcctttttttttttttttttttagacggagtcttgctctgtcacccaggctggagtgcgatggcacaatcttggctcactgcaacccccacctcccaggttcaagcaattcttctgcctcagcctcccaagtagctgggattacaggtgcaagccaccatgcctggctaatttttgtatttttagtagagatgggatttgaccatgttggtcaggctggtctcaaactcctgacctcaggtgatctgccttcctcagcctcccaaagtgctgggattacaggtgtgagccaccgtgcccagcccttacctttctttttaagaggcgacatctcgctctgtctcccaggctagagtgtagtggtgcaatcatggctcactgcagcctcaagctcccaggttcaagtgatcctcctgcttcagccccccaaaacactgggaatacaggtgtgagccaccctgcccagcccctttccttacctttctctctgactttgcctcctcctcttcttgttgtttcagaacaaagggaccccggtgaaacagtaggtggagatgagattgtgatggtcatcaaagacagcccacaaaccatcccaacatacacagatgccttgcacgtttattccacggtagagggtatgagctcccagctggcccagggatccctctgctcttccccctctcctgccactcccaactcctgaacctctcctccaggacccacgcccttccaggatcccctctacctaccctctgaagctcccccgaacccacctctctggaattcccaggatacatcgcctaccgacatgatcagaaaggctcatgctttatccagaccctggtggatgtgttcacgaagaggaaaggacatatcttggaacttctgacagaggtgagttgacaaaaggtagctgggaccaccgcccaggccaagaagggtgcaggcggagggggctgagcctcctcctaacccctctccatttccctcagctccaaatccaagccagatctcaatacagaaactaagaagcccactttccaacaactttcccaaatgcagggactcttaaaagccacagtatgggagataaatttctataaacaaatcccccttggatataaacaatgtttgggcaaactgttttcttttaatgtttatatgtttttattgcaaattatttaaaaaatgcccagccaaggattccatacaaactatggtataggaagaggccacaacggtctctcatcttaggacaagaatacccacctgccccgttccctaaccctccccccataagtccatgacactgactcctccaagctcaccacacctgttgctgcaggtgacccggcggatggcagaagcagagctggttcaagaaggaaaagcaaggaaaacgaaccctgaaatccaaagcaccctccggaaacggctgtatctgcagtagaagtagaaagaccaggaggagctttccttccagcattctttctgtctcacagaaatttagaggcagctcttacctctccccaagatcttctgttcccaaggccaaatggcacccagtttcttttccatcacacccttcatgcaggtcctcctgtccttattagagcaagccagccaaaacttagcacaaggcatggtggcaacattaacatcacctccctcaggctggactttctatctttattaatgcaaccgaagagacctaagagtgcattcacttatcccactttctgttcctgtggtcttctttctcccatgaagcagaaactggataaagctcaagattttccatagacaaaccaaagcccactcatcccctcctaccccaatccaacctctgctggctcctgcatctcacttggaggtcaaacctcctcctgaggccaatgcattcccaacttccagttctttcctttaccctggagagttagtaaggtaagaaccattctttctctccaaaaccactcctccttggctggcaagttggtgtcctaactccgttctcttcctagctcatggcctctctagataataaagttgtctcctcctttctggatctcttcctcctaacacccctcccctgaaaccctggactctgccctctctccaagaaaatccatctattcaactattcttgcattcaattactctaaatgagagcgtgttggagctatggcaaattccctgttgtcaccttgctattttgcagacaacataatatttaacctctcataaccagagaggttaaataatttgtcaaatgcaatacagtaagacagaggcaaggacaaggtttgacttccagcccagcctcttttccacaacctgctaaatcctgatccatctgaaaacttttctaattagtgaagatgactaataaaaattttccctatctccaaggtaggagctttctggaagtttctagaaattttcaataaccaccagccaaggttacctccaggtaaccttgcagcaccaggctggaagtcagatcggcttcactatcttccaactctacagcctgtatctctccatccccagctttgacctttcctgctcaagtaacctacgggcacatccagcgtcactaaaaactcagggcttttcttcccggttactcctccaagcgttccctggtatcctcaacctcagatcccaggttcagatttctgcagtcaatctatgacccctctcttcttgcatccttcatatgccaccagacaccatgcccagtccagcctgattttgaaacaactttcatgccggtcttctcttccctgacatgttactgtccaggctcaagtcctcagcttctcatatctgcatctttgcaaccaacttcctcccttgcctctctgcttttccatcccacttttcatgtgtcctccataccatctataacagtgatctccctggaacactcaagaagacacaacataccatattatttaaagaccagggtactggacagtggctcacacctgtattcccgactttgagagtctgaagcgggaggatcacttgaggccaggagttaagagaccagcctgggcaacacagcaagaccctgtctctaaaaaaaaaaattaattaactgggtatggtggcacatgcctgtagtcccagctactcaggaggctgaggtgggaggatgacttgagcccaggagtttgaggctgcaaggagctatgatcatgccagtgcatcccagctctaggtgagacagtgagatccggtctccaaaataaatcaatcaatcaaataaagaccaaagtcaaaccgcacatcaggatctctcacacccttccaattttgccatctaccagcacttagctaaacccatctcccatctcttccaccatgaattcactctttcaaaaaggctaatgtcttcttactcacccttgcctctaagcctttgctatcaccatttcccccaagctggagggccctccctctccctttacccctcttccactacctcccacccctactttttccagaaagccatttcctctcttttttctgattgatccttccctctcacccaggattagatgctggaaatgaccacttctggagggcagggaacaagcccttaatctgcataatgagtgttcaataaacagttgtcaaactttgaaagaaagtgttgaaatctttgttctgtgctgaaacagtgaggctgatacaaaaggagttatggatttaatttcttttttcccagtggctggcttcctcccaggtgtgtctatcatgaatggagaatcaggagcttcagcctgtgtcttctttccttttttttttctttaagagatgagatcttgctctgccacccaggctggagtacagtggcaccatcatagctcactgcaccctcgacctcctgggctcaagcaatcctcccacctcagcctctcatgtagctgggactacaggtgtgcatcaccacacctggctaattttcttatttttcggtagagattgggtcttgctatgttgccgaggctggtctcacagtcctggtctcaagcaatcctcttgccttggcctcccaaagtgctgagattacagatgtgacccaccacaccgagctcctgtctctttcacaaaaacagacgtgttgggaatttgtaaagttacaggccacactttcatgctgaatggctatcttttacataattgttccatctccagaatgtttccaaggaagtatgcagacagaaaaatgtcacttttcagaactataagggacattggaggtgggctagttacagcatcaaagacatttagcaagtgtgccatctctctagcctggtgcccatggcagacatgactaatcaatcacacctatttttcctaatgaactcaagtgttacctcaaagcctttctcctctgagcacttgggaagctgacacctgtctactggcataagtacatcattcctgatccatttgaacctccaccttaggaagtcaatcgtctatggtcattttatgtggtacacccaggaatctagccatggcagtaaccggggttttatccatggagatggaaaaccaagtggccaacacaggggtgggttcgaagggccaagagatctggggtgatgcatgcactgagctctatacacttacttacatgccaacctgcggtccaaacacccaatgattctgggagtctccaaacatgagggtcagaaaactgtgtctcactcaccagatccagtctgcagtttgtttttatcaacaaagctttgctggcacacaggcatgtttattcacttacatactggctacggctgccttcaacctacaatggtagagttgagtagttagaacagacagcatatggcccacaaagctgaaactatttactatttggccccttacagagaaggtttgacaacccctatcctaatatctttccaaaaattccaattttgctatcaatactaattttgatgtcaatgacgtatcacctcacacctgttgggatggctattatcaaaaagataggagataagcgttggtgagggtgtggagaaaagggaacctttgttggtggaaaatagaatggtgcagccattgtggaaaacactatggagattcctaaagaaattaaaaacaggctgggcatggtggctcacacctgtaatcccagcacttagggaggctaaggcgggtggatcacttgagggtgggagttcaagaccagcctggccaacatggtgaaaccccgtctctactaaaaatacaaaaattagccaggtatgttggtgggcgcctgtaataccagctacttgagaggctaaggcaggaaaatcgcttgaacctgggaggcggaggttgcagtgagctgagatcgtgccactgcattccagcctgggagacagagtgagacgctgtctcaaaaagaaaaaaaaaaaggaagaggctgggcgcggtggctcacacctgtaatcccagcactttgggaggccgaggtgggcagatcacgaggtcaggagatcgagaccatcctggctaacacagtgaaaccccgtctctactaaaaatacaaaaaattagccgggcatggtggcgggcacctgtagtcccagctacttgggaggctgaggcaggagaatggcatgaaccctgaaggcagagcttgcagtgagccgagatcacgccactgcactccagcctgggcgacagagcaagactccatctcaaaaaaaaaaaaaacagaactacaaaataatcaagtaatcccactcctaggtatatatgcaaaataaaggaaatcaatatatcaaagagatatctgcactgccatgttaattgcagcactattcacaatagccaagatatagaatcaacctaagtgtctatcaatagatgaatggataaagaaactgcggtatatatgcacaatagaatactattcagccataataaagaacaaaatcgtgtcatttgcagcaacgtggatgagcctggatgacactgtattaagtaaaatcagccacgcacagaaagacaaacatcacatgttctcactcattatctggaagctaaaaaagtagatctggtgaagatagagactggaatggtaattaccagaggctgggaagggaagcgggcagaagacgtgaagagaaatgggttactgggtacaaaagtacagttaggtaggatgaataagttcttgtattcgagagcacagtaggaaaattattattaaccgtaattatttgtatatttcaaaatagcaagaggagaagaatagcagtgttcccaacacaaggaaaagataaacgtttaaggtgatggatatctaattaccctaatttgatcaccaccccaaaaatctgtacaactatgatatatcaaataaaaaaacagaactgtccaggcatggtgactcacgcctgtaacctcaggatgccaaggcgggagaatcacttcagcccaggagttttaaactagcctgggcaacaaagtgaggcttagtctctactaaaaaattttttttaattagctaggtgcggtggtgtgtgcctgtagtcctagctacttgggaggctgaggtgggaggatcgcttgagcccaggaagtcaagaccgcagtgaaccgagattgcacctctgtgcgccagcctgggtgacagagcaagatcctgtctcaaaaaaaaaaaaaaaaagaaagaaaagaaaaaaaaaacagaccaccatatgacccagcaattagactttttggatatatatccaaaggaaatgaaattaaatctagtaaagatatcttcactcccatggtcattgaagcattattcacaatagccaaaatgtgaaaaaatcgaagtgtccatctacggacgaatgaataaggaaaagactgtgcgtgcgtgtgtgtgtgtgtatgtgtctgtgagagagagagagagactgtgtgtgtgtgcatgtgtgtgtgtgcgcacacaatggaatgttattcagctttaaaacaaataaataaatgagattctgccgtttgccatcacatggatgaacctaaagtatattatgctagatggaataagccagcattgaaatctaccgttgtattagtctgttctcgtactgctataaagaaatacttgagtctgggtaatgttcaaagaaaaaaggtgaaggcaggtgccgtggctcacccctgtaatcctagcactttgggaggccgaggtgggcggatcacttgaggtcaggagttcaaaaccagcctggccaacacagtgaaaccctgtctctactacaaatacaaaaaaaattagctgggcatggtggcgcatgcctgtaatcccagctacgcgggaggctgagatgggagaatcacttaaacccaggaggcagaggttgcagtgagcactctagcctgggtgacagagagagattcggtctcaaaaagaaaaaaggtttaattggctcagggttccacaggctgtacaggaagcatggccggggacgtctccggaaacttacaatcatggcggaaggcgaagagaaagcagacacgccttacttggctggagcaggcagaagggaggtggagaggtgctacacacgtttaaacaaccagatctcgcggtaacacactcactagcacaagaacggcaccaaaggagaaacctgcccacatgacccaatcacctcccaccagatcccacctccaacactggggattacaatctgacatgagattgagcagagacagacccaaaccatatcaatggctttgttcttcaagacctgcgactaaaggttttccccaattattaagcaaggatgtgtaggtttagcctggaagtttcatattcagcatcaggaactgatccaggctttgtaggacctgtacagttgggcagaaagagtccctctttaagaagaggacaaacagcaacgcagaattagtacagccacataagcacattgtcagggtctctcctcggaccatgcagaggcccagaaaagtggggatcctgtagcttttgccacatcagctccaaggcaagtccccctttgtttatctgttctccaagacgctctccgatagcagcagaaacagtcgttttaaaatgcagatctgagccgggtatggtggtacgcacctgtaagttccagctacttgggaggttggggtgggaggatcacttgagcccaggaagtcaagactgcagtgagctatgattgtgcattgcagcctgagcaacagaactatctctaaaagaataacaataataaatgtgaaataaatctttgaaaatgcaaatatgacctgctgtgcatcttcttaaaatctttctgtgacctcccactgcccttaggataaggaaaaaagtcttaacttctagatccctacatctttttatctctactccttcagtgtttcttttttttattattattatactttaagttttagggtacatgtgcacaatgtgcaggttagttacatatatatacatgtgccatgctggtgcactgcacccactaacttgtcatctagcattaggtatatctcccaatgctatccctcccccctctcccctcccccctccttcagtgtttctgaagtcactttggacttctttcttttccaagataggctatttcctatctcagttacctctacttagatcactcctccaaaccaccttgttatcctttatactgtagctcaaatacatttctgaagggaagtctctttgtccatcacctcagacaagacccgagtttagagttctttgtagactttttctccaagccacaaatcacactttaaaattatgtcttttgcgatatgattatttattcaaaatctggctcttctacctgatggatccaagattaaacatcaattgtcataagccagtgagctttggggtcatgtgttactgcagcataacctaatctgtgctgactgacacatgagaccagccaggttaaaacagcacattggaatgaatgacattcattctaccagctacctaggaaatgtacagaatctatgagataaaaataaatccacttcttttacctatgagcagtttctatttaatcatgtttaaattttattcactaataagaatgaataagcaatttccaaaggttccaaagtgtagcacccagtttagcatgagacacaagaaaaggaaagggagttctagctttgagaatttggaacctgaactcttcaccttcattctgattggtcgggttatgtgggaataaaatatgtcggctgtttgtgaagttgctcttacagatgatcaattataagaatgaggtcaccttcaccctggccaattcagtaagccaatcaccctattgctgtgtatgctcacccacagtccatacccatggcctcaaggctatcttgatacacccagttggcttgctgttagcttctgatagtacaagtcacaagagagagagagaaaatgggaagaggacaaaaaaagaggattcttccttttggagttgccagtagcatcacgtcattccagtttgcaacttttttgccccacacacaaaaccggcatcattgtgccccctgaaatatacgtgcatcagctggccagcagccccgtctcagatatatgcacagatatgcacatggcactgtcttcttcctcttctaagattctagagtctgataacgtcaactcttcccagcgtttcccaggcctcagcttgtcagctgattccacagaaattatttctgggttagcactagtgttaaccaggtccttgttaactagtcttgccttcttgcttttctggtccttcactacctatttaattaattcccatgttaaattctttctgttaaaagacatcagcagatgattgggtaatgaaaatatggtatatatacagaatggactatgattcagccataaaaaaaaaaaagagtgaaatcatgtctcagaaagtcaaatagcacatgtgtattagtccatcctcattctgctaataaagacatacccaagactgggtaatttataaagaaaagaggtttgatggattcacagttccacatggctggaaaggcctcacaatcatggtggaaggtgaaggaggagcaaaggcacatcttacatggtggcaggcaagagagcgtgtgcaggggaactgccctttataaagccatcagatttcgtgacacttattcactatcacgagaacagcatgagggtaactgaccccatgattcaattaccccccaccaggtccctcccatgacacatggggattatgggaactacaattcaagatgagatttgagtggggacacagccaaaccatatcaacatgttctcatttataagtgggggccaaataatgtgtagacaaggacatagggtgtggaattatagacactggagaggcagaagggtaagagagtaggaggagatggaggatgagaaattactttatgggtacaatgtaccttgtttgggtgacggttacactcaaagcccagatttcaccactaggcaacacatccgtgtaacaaaactggccttgtactccttaaatttatgcacttttttttttctttgagactgagtcttgctctgtcaccaggctggagtgcagtggtgcgatcttggctcactgcaatctccacctcccgggttcaagcaattcccctgcctcagcctcccaagtagctgggattacaggcacccaccaccacgcctggctaattttttgtattttagtagagacgaggtttcaccatgttggccaggatggtctccatctcctgacctcatgatccacccacctcagcctcccaaagcactgggattacaagtgtgaaccactgcacccggccccgtgcaaaattttttcaatggtagcttctggaaaatgtcatctataagaaactacaagtagaacacaaataaatgacagaatatgagctttcggtgtctacattccgtaaatctagtaaataataaatattaacatacaggccaggtgtggcggctcacatctgtaaacccagcactttgggaggctgaggtgggcagatagcttgagctcaggagtttgagactgcctgggcaacatggtgaaaccccatttctactaaaaatgcaaaaacaaatatcctgggatggtggtgcatacctgtagccccagctactagggaggctgaggtgggaggatcaccttgatcctgggaggtggaggttacagtgagccaaaatggcactactgtactccagcctgggtgacagagtgagaacctgtctcaaaagataaaaaaataattaacatacaaaaaaattctctctgttaaaatatctttagtcctcccacaacatggataaaccttgaaaacgttatgttaagttaaataagccagagacacgacgcacaaatattgtatgattccactttagaaggtacccagaataggtaagtttatagaggtggaaagtcgattagaagttttcaagagctggggataaggaggaacagggagtgattgcttaatgagtttgagttttatctggggggtgatgaaaacattttggaaatagtggtgatggctgtacaatgttgtgagtgtaattcacgccactgaactgcacactttaaaaatggttaaagtggccaggcatagtggctaacacctgtaatcccagcactttgggagtccaaggtaggtggatcacttgaggccaggagtttgaaaccagcctggacaacatggtgaaaccccatctttactaaaaatgcaaaaattagccaggcctggtggcacacgcctataattccagctactcgggaagctgaggctggagaatcacttgaacctgagaggcagaggttgtagtgagccaagatcatgccactgcactccagcctgggtgacagagtgagattctgtctcaaaaaaaacgttaaaatgtgccacattttcttaatccagtctatcatttttggacatttgggttggttccaagtctttgctattgtgaatagtgccacaataaattaggagacatacctaatgctaaatgacgagttaatgggtgcagcacaccaacatggcacgtgtatacatatgtaacaaacctgcacgttgtgcacatgtaccctaaaacttaaagtataataataataaaaaagtttaaaaaagttaaaacgagtgagattctgtctcaaaaaaagttaaaatgtcaaattttatgttatataatctaccacaatgttttaaaattaattatgtaaaatatcaaaaaccaatgaattatacactttatatgggtgaattgtatggtgtgtgaattatatctcaataaagctgttcaaaaaaataacttgcgtgctttacaatgaagaaaactggcaaaagctacctttaccaaggaaagaaggttaacatcaccaagaaggtcaagtggatttcacgaagctcctgatttgatgtgataaagggccctttcatctctgcagtcttctttccaaaaactcatcaccccaatctaatcatgagaaaaatatctgacaaacctagattggttaacattctaaaggatacctgaccagtcttcctcgagactatcaaaaacgggcagtcatgatggctcacacctgtaatcccagcactttgggaggtgagggcaggaggattgcttgagcccaggagttcaagaccagcctgggcaacctagcgagaatcccccgatctcttccaaaaatctagaggaaaaaaaagactgtcaaaaaatcatgaaaaacaaggaaaggctgagaaactgtcagaccaaaggagactaagaagacaagatgactaaatgcgttgtcagatcctggacaggattctagaaacagaaaaaggacatttgtgggaaaaagggtgaaatatgaataaaacctggagtttagttagtaatactgtaccaatgttagttttgacaaatgtatcccggttatgtaaaatgttaacattaaaagaaaccagatgaaggaacagtgtaggaattctctgtactgttcttgcaacttttctgtaaacttagaattatttcccaaagtaagtttatttagcgctgcaatgaacatgggagttcaggtatctctttaatacacggatttcaatgatttaatcatggcacaatgtaaacatatgttacaatgtcacattgtaccccctaagtgtgcacaattgttattgtcaattggaaataaacaaagtttatctaaaacaaacaaaaaaataactgtggtagttttcattaaccttgattgcaacagggtgtaatcatcattgattaccaagtaggagaaacaaacctaaagtatctaatccatgtaaacgaatttgtcagttgtcatctgttgctattaaatgaatatgatgtaatatccaattggcaaatcataaattttgatttatacttaatttgagaagtgtttggattttgtacctggtgctgggggttagaatagtactgtgtcattcaatagctacaggattctgggtgggtttaggtttttaggcaacatatctattcctttggatagactcttggtgagaagtgggttgaaagagattagggaacagatattgagtatttcctgaccatgcccaacattttcccattgattattctgtagaaaccagcattggtgggaagacagaataaatgatccccccatgcaaaccacggaattaaagaatgtttgcacacccagaaggcacacccctggttgttcacgttgactgtgtatatatccaaatgggatttctatactacagtttcccaaatgttggtcttttacatgcaaacttcgtctcatatctgcataaccctgtgtgattgttccgttaatatttttctttaaaataattctattttctttaattcgaaatgaaactgtctcagaattcaccactatataattcatctatgtaacaaaaaccacttgcacccccaaaagctattgaaattttaaaattgctttaaaaagggaactgttagccaggcgcagtggctcacgcctgtaatcccagcactttgggaggctgaggtgagtggatcacgaggtcaggagatcaagaccatcctgtccaacatggtggaaccccatatccactaaaaatacaaaaattagcgggcatggtggcgcgcacctgtagtcccagctacttgggagtctgaggcaggagaatcgggaggcggaggttgcagtgagctgaggaggcagaggttgcagtcagccgagatcgcaccactgcagacatagtctcaaaaaaaaagtggccgggggggtgggggtggggaactgttatccatacaataaaatattatttggtaataaaaaggaataaagagccaggtggggtgactcacacctgtaatcctagcactttgggaggctgaaatgagagaattgcttaaggccaggggttcaagaccagccctggcaacagagggagacccagtctctacaaaaaaaaaaaaaaaaaaagaagaagaaaacattagctgggtgtggtggtgcctgcctatagtcccagctactcaggagacggaagtgggaggatcacttgagtccaggaattagagggtgcagtgagctatgatcatgccactgcattctagcctgggcaacagatcaataccctgtctcaaaataaaataaaataaaataaaataaaataattaaattgaaaataagaaaaagaatgaaggactaatacaggctacaacctgaatgaaccttgaaaacattatgcgaagtgggaaaagcccattgcaaaaagccacatattacacagttccattgctatgaaatgttcagaacaggaaagtccataaagacagaaagaggccaggcatggtggctcacgcctgtaatcccaacactttgggaggctgaggcaggtggatcacaaggtcaggagttcaaggccagcctgatcaatatggcgaaaccccgtctctattaaaaatacaaaaagtagccaggcatggtagtgcgttcctgtagtcccagctactcaggaggctgaggcaggagaatcgcttgaacccaggaggcagaggttgcagtgagccaagatcgtgccactgcactcaagcctgggcgacagagcaagactccatctcaagaaagaaaaggacagaaagcagattagcagttgccaggggttgatgggaaagaaacgaggagtgactatttaatgactacaggtttccttttggggtgataaaaaaaacttttggaattggatagtggtgatggtgtcacaactctttgaatatatcaaaaaccattgaattgtatactttcgtttttgggggggttgggggggataggttctcactcagctgccaaggctggagtgcagtggcacaatctcggctcactgcaacctccacatcctaggctcaagtgatcctcctgcctcagcctcccaaagtgctgggattacaggtaggagacaccaggccctgcactgaattgaatactttcaaagggtgaattttatggtatgtgaattatacatcaataaagctgttgttttaaaaaaggaaaatgtacctattataaaaggaaagttagtatcacttgccacaataggaaataactgtcacgcgtgtccgtatagaagactacctaaacaggctttgtgtggagcaacaaggctgttgattcacttgggtgcaagtgggctgagtccaaaaagagagtcagcaaagggagataggagaggagcagctttatagggcttgggtaggccgtggaaagttacagttaaaggtagttgtctattgtcagcagaggagggggtcacaaggtgcatggtggagagatgatgggactcattgtccagaagaatgtcacagggttgattgatcagttggggcagggcaggaacaagtcataatggtggaatgtcataaggtgggttaattagttaagacaggaactggctgtttcacttctttgtggtttttcggctgctccagattttttggctcctgcaggccatctagacgtatatgtgcaggtcacaggagttacaatggctgagcttcggctcagaggcctgaccataaccataccaataagaatatacaagtaaagccgggcgtggtggctcacgcctgtaatcccagcattttgggaggccgaggagggtggatcacaaggtcaagagatcaaaaccatcctggccaacaaggtgaaaccccatatctactaaaaatataaaaattagccaggcgtggtggcgtgcacctgtagtcccagctactcgggaggttaaggcagaagaattacttgaatctgggaggcagaggttgcagtgagctgagattgtgccactgcactccagcctggagacagagcgagactccatctcaaaaaaaaaaagataaaaaaaaaaggatatacgagtaaaatcttaagtgttcatttatgatccactaaaagtcatctcgatgtaccaccagtagtgtgagtctcacatactatgtacaaacatttctccaggagtagtatggcttgttaaaagtgtatgagcaattaatcccagcactttgggaggccgaggcaggcggatcacgaggtcaggagatcgagaccatcctggctaacacggtgaaaccccgtctctactaaaaatacaaaaagaaattagtcgggcatggtggcgggcacctgtagtcccagctacttgggtggctgaggcaggagaatggcgtgaacccaggaggcggagtttacagtgagccgagatcacgccactgcactccagcctgggtgacagagcgagactccatctcaaaaaaaaaaaaaaaaagtgtatgagcattttaatttcaatagatttgttcactcattcattgcattaaaataatttatcgaatctctgtcaaataccaaatgctgtactaggtgctagaaatagcatcaccgacaaagacaaagtcattgatctcatggaactgacattgtgtacggaaatgctgtgataagcaaacacatagcactgcaatatatatttttgctagtgctaagtgtcatggagaaaaataaaacatcgtaagtgggttacagaatcatgggagcaagatgcttttttattgtggcaaaatacacataatatcaaatgtatcgctttaaccattgttttttgttttttgttttttgttttgagacagagttttgctcttgttgcccaggctggagtgcagtggtatgatctcggctcactgcaacctccacctcccgggttcaagcgattctcctgcctcagcctcccaagtagctgggattacaggcgcccaccaccatgcccggctaatttttgtgtttttagtagagacggggtttcaccatgttggccaggctggtctcaaactcctgaccccaggtgatcttcccacctcagcctcccaaagtgctgggattataggcatgagccaccatgcccggccgcgctttaaccattttaaaatattcaagcactggcatttagtgcattcacagtgctgtgcaaccaacacctctgtctcgtcccagaatatttttattacctaaaaggaaactctacacccagacagaaggtcatggaggtgacatttgaacgggaatctgaaggaagagcaagtgagcgccatgtcaagatctgatcttctttgcataccaccttcaccccatatcaacaaactcctgtactattatttcgttcatattttcctttaaagcgagtctgtctctttacttaagagtacagttacctgctgggtacagtggctcatgcctgtaatcccagcactttgggaggccgaggtgggtggattgcttgaggtcaggagttcaagaccagcctgaccaacatggtgaaaccccgtctctactaaaaatacaaaaattggcctggcatggtggtgggggcctgtagtcccacctacttgggaggccaaggcaggagaatcgcttgaacccgggaggtggaagttgcagtgagccgaggttgtgccactgcactccagcctgggcaacagagcgagactccatctcaaaataaataaataaacaaataaataaatgtacagttatccatagaatataatattatttggcaatttaaaaaaataaagtaccatctgttattgaaaagagtcaaactctataaaatgtttgaagaaattttttctgagccaaatatgagcgaccatggtccatgacacagccctcaggagatcctgagaacatgtgtccaagatggtcagggtgcagcttggttttatacattttagggagacgtgagatgtagggagccgaagacccgtgggacgtgaccaactcagcattccaccggaggctacgtgatcaaacagcaaactgtgtaccatgaatgcaggatgtgagcaaactcacgactgctcctgccgacagaaggtttgccggaggcaatctctggcgtggaggttatctactgcaacatctagagcctgctgttcgaggaatgcagtcttgcaagcctactctggactgagcccctggactccttcttccaccccgcttctcactatcttttttgcctaataaatacggagggctgtgtaaagctcagggcccttgtccactagaggcaaggtgcccccgaccccttcttccaaatatactcttttgtctcttgtcttttattcttgcgttcgccccctttgttcagtccaccaggggtcgtggtaggttacatagtggtgccccgaacagcgacagaatcaggctctcaacaatgagagcttacctcaatcaatacatgtaaaatgtacactggctcaggccggaaaggcgggacaactggaagcagggacctccaggtcgtaggcggattcaaagattttctgattggcaattggttgaaaagaattattatctaaagacctggaatcaacagaaaggaatgtctgggttaagataagggattgtggagaccaaagttttatcatgcagatgaagcttccaggtagcaggcttcagagagaatagattataaatattatcagacttaaaaaggtaccagactcttagttaattctctcctagatcagggaaaagatccagaaaggaaagaagattccctatgttaggaataacatgttagggaaccctggaggcaggcagatcacctgaggtcaggagttcaagaccagcctggccaacacgacgaaaccctttctctactaaaaaatacaaaataaaaatacaaaaatattagccgggcatggtggtgtgtgcctgtaatcccagctattcgggaggctgagtcaagagaatcacttgaacctgggaggtggaggttgcagtgagacaagatcgcgccactgccctccaccctgggtgacagagcagaactctgtctcaaaaagaaacaagaaaaaaaacaaaaaaattagaatgcagtaccgattcatgctacaatgtggataaacattgaaaacaggcctgcctcagtggctcatgcctgtaatcccagcactttgggaggctgaggcaggaggatcacttgagctcaggagttcaagaccagcctgggcaacatgatgaaaccacatcgctacaaaacatgcaaaaattagcctggcatgatggtgtgcatcttagtcccagctactaaggaggctgaggtgggaggattacttgatgcctggaagtggaggttgcagtgagccatgatcacaccactgcactccagcctgggcaacagagaaagaccctgtcttaaaaaagaaaaagaaaagaaagagaaaagaaagcatgatgctgagtgaaagaagccagacaaagagggcttcatagtgcataattccatttgcatgagtgtccagaatagataaatccacagacgtagaaagtaggttagaggtagccatgggctagggagtgggaatggggagtgactgctcatggggatagagtatccttttgagggggtgaaagtgttctagaactagatagaggtggggttgtacaaccttgtgaacgtactaaatgccactgaattgtacactttaaaaaggtttaaatgatgacttttatattatgtgaatcttactgtgataaaaatatcctgatttctgtgtcccaaaccattgaaagctaaatcttggggagctgggccctgccaccaggcctccacaatatcaaccctagctgccccagtgattccagtaggcagcaagagttgaagtactggggtctagagaccagttcaagcatgcagatgtgtcagggttaatgatattttgtacaagtcctgggccagataacagctgttacaactaaaaggtcaatacacctaagatacaaagatcttctgcaaataagacacaaataacctaaatgtgtccaaatatgcagataatctttgaaatgggcagccacaggtgagaagctctttaaaaaattaaaataaacgggccagacccggtggctcacgactgtaatcccagcactttgggaggctgaggcgggtggatcacttgaggtcagatgttcgagaccagcctggccaacatggcgaaaccctgtctctactaaaaatacaaaaattagctgggcctagtggcacgtgcctgtaatcccagctactcaggaggttgaggcaggaaaatcgcttgaacctgggaggcggaggttgcagtgagccaaaatcgcaccactgcactccagcctgggtgacagagtgagactccatctgaaaataaaataaaataaaataaaaataaaataaaataatgaaaagaggtctttcctgctagtgaagttaaaaaagaaaaaagaaaaagaaaaagaggtcaacttcactatcagccagggaaatgaataccctagaacttaaagtataataaaaatatatatatttttaaaaaaaaagaaaatgagagtaaagatgacttactagttttcactcatcagactggcaatcattcaaaaactaataatgcaatgaaacccagtgcttgcaactatgtgttgaaaagggcacacctgtgtgttgttcgtgggaatgtgatttattattgcatttgggggaagttactagaacaacacctagttgaaattccacactgggaatccaccctatagaacgatatttatcaagggattatttgtagtagcaacaaaaaacaaactataaataacctgtgtgccctcaatggtggaagggttggataatcagagtacactcctatcatgagccattaggtagctattaaaaataatgagttagatatctatctattcgcctggaggaattccatgatgtacgtgctgccaagttttttaaaaaatggataaataagtaggtttcagagaaacatatacagtcatgtgtcacttaatgacagggattctttctgagaaatgcttcattaggcaatttcatcatagtgccagtaacctagagtgagcttacataaacctaaatggcatagcctactacacaccagggctatacgttctagtctattgctcctagactataaacctgtacagcatgctactgtgctgaatactgtaggtaactgtaacacaacagtaagcatttgtgtatctaaacatagaaaaggtacagtaggcctggtgcagtggttcacacctgtaatcccaacactttgggaggccgaggcgggtggatcatgaggtcaagagttcaagaccagcctgaccaatatggtgaaaccccatctctagtaaaaatacaaaaattagctgggcgtggtggcacacatctatagtcccaactacttgggcggctgaggcaggagaatcgcttgaacccgggaggcggaggttgcagtgagccaagatcgcgccactgcactccagcctgggcgacagagtgagattccgtctcaaaaaaaaaaaaaatacagtaaacataagatataaaacaaaaaatgatatatctatatagaatgcttaccaggcttgcagcactggaagctgccctgagtgagctagcgagagagtgatgagtgaatgtgttgctactgtacacttagcatacactaaatgcattttttaattctctttataatcagcacataataattgtacatgtttatgggtacctgtgatgtcttaatacatatgtacattgcataatgatcaaatcaggatagtgagcatgtccatcacccaaatctttatcatttctttgtggtagttacattcaagatcctccgttttctagctatcttgaaataggcaatacaggccgggcacaggggctcacgcctgtaatcccagcactttgggaagccaaggcgggcggatcgcctgaggtcagcagttggagaccagtctgactaacatggtgaaacccccatctctactaaaaatacaaaaattagctggtcatggtggtgggcacctgtaatctcagctactaaggaggctgaagcaggagaatcatttaaacccaggaggcagaggttgtggtgagctgagatagcaccattgcactccagcctgggtgacagagtgagactccatctcaaaaataaataaataaataaataaataaataaataaatacagatgaagatttgtttgcctgccccattgctcacctcctgctgtgtggcccagtccctaacacgccacagaccactaccagtccatggccttgggattgggacccctgccctagttcatgttattttattacagaagacctaagaaaataatatagtatccaattagagagacttgaaatggaaaggatgttcctaaaagaagcctaattgaaattaggatgggaagagagaggaggaaacacccaccctttgcaaaccatataaatgataaagggttaataaccaaaatataaaataaactcctacaactccacagccaagaaacaactcgattgcaaaatcgattaaaaacttgaatagaaatttatccaatgacatgcaaaaagccaagagatatatgaaaaaatgcacatcactaatcatcagggaaatgaaaatcaaaccacaatgaggccgggcgcagtggctcatgcctgtaatcccagcactttgcgaggctgaggtgggtggatcacttgaggtcaggagatcaagaccagcctggccaacatggtgaaaccccatccctactaaaaatacaaaaattaaaaattagcacacacctgtaatcccagctactcaagaggctgagacaggaggcttgcttgaacctgggaagcagaggttgcagtgagcggagatcgcacctctgcactccagcctgggagacagagcataaataaataaataaataaataaataaacaaacaaacctcactcttttcctcacctaacagcaggtccccgagcagatactgaagatgcctcaacccatagccccttggctcacctctgatttcaccttacagcagcagtgggcaatttcacatatgctggtggaagccccgctacttctgtctttactgtctggacatcttctccagcaccgtgggagtgtgctcagcaggggatttaacatccccaagtaccaccctcaacaaataaaggagtcaatggtaaatacccacatacctcttccctcaatggaataattctgaaggtgcggtctatgtgataccccagagagttcccccagcaggatggagccctgtttcctacaaacggaatataatgtgtttattaacatactttatttcctgcttcattttccccacttctgggaccaaataaaccatctgcacccaagtgctttatgattagagcctgttttgaacccaaatcaagactatcagttcccctgggcacagtggctcatgcctgtaatcccagcaatgtgggaagctgagaaaggaggtctagaccagcctggacaacatagcaagacctcatttctaccaaaaaaaattgtaattagcctgtcatggtggcacacacctgtagtcctagctacttgggaggctgaggtgggaggatcacctgagctcaggagttcaaggctgtagtgagctatgatggcactcacagcctgggtgacagagcaggaccgtctcaaaaataaataaaccaaacaccacatgttctcacttataagtgggggctgaacaatgagagcacatggacacagggaggggaagaacactcactggggcctgttgggggagggcagggtggggagagcattaaggaaaagagctaatgtatgctgggctcaatacctaggtgatgggtagatgggtacagcaaaccaccatggtacacatttacctgtgtaacaaatctgcacatcctgcacatgtaccctggaacataaaaacataataatattttgaaaaaactctatcaaaaaataaataaataggattctgctatttattctgctctaaagacccatgcacatgtatgtttattgcagcactattcacaatagcaaagacttagaaccaacccaaatgcccatcagtgatagactggataaagaaaatgtggcacatacacaccatggaatactctccagccataaaaaacaatgagttcatgtcctttgcaggaaaatggatgaagctggaaaccatcattctcagcaaactaacacaggaacagaaaaccaaacaccacatgttctcactcataagtgggagttgaacaatgagaacacatggacacagggaagggaacatcacacaccacggcctgtcaggtggtgtggggcaagggaaggaagagcattaggacaaatatctaatgcacgcagggcttaaaacctagatgatgggttgataggtgcagcaaaccaccatggcacatgtatacttacgtaacaaacctgcacgttcagcacatgtatcccagaacttaaattaaaataataaataactaagtacatataaaaatttaaaagactgtccgttctacttgaccactgccacatcaggagcccttgacccttgccagaattcaggaatccccatctctcctagattctaatcaaggaagaaaatcagggactatataaaaaccttttaggtgttggattttaaaaaaagcatttgtgcttggaagaatgggtggagagtggctgaagcccaagatgctgagagaagaaatctggacctcactcctagagaggatagaatgaagtagaccacccccttcttcctccctcccaatgttcattgatggtttcctggtaccagactcattgccacataaagactctaagattttcccaaagcaatcagcactggactccaaaccaacatgactagaaaactggactctgggagtgtataactggccctgccttataccaatttcccagggggggaaatgttatttttgataacattttctatagagtcatatcaaaaagaaaggcttttttcttcctgaatatatcttttattcctccttatctctcttcactcttccttctataactggtttcagaattcccaggagagttcggatgggagacaccaatgtcctacctaccatggctttgggcaaaataattttttttcagaaccacggacagtggcaaaagtttgttcacccagtgggacttttttttttttttttttttgagatggagtcttgctctgtcacccaggctggagtgcagtggcacaatctcggctcactgcaatcttcgcctcccaggttcaagtgattctcctgcctcagcctcccaagtagctaggattacagatgcccacccaccatgcccagctaatttttgtacttttagtagagactgggtttcaccatttttcccaggctggtctcgaactcccgacctcaagtgatccacccgcctcagcctcccaaagtgctgggattacaggtgtgagccaccatgtctggccaccttatggactttttaggtgggtttttccccaacctttgggctcaaattgattttttttttttttttgagacaaggtctcactctgtcacccaggctggagtgcagtggcatgatctcaacttgctgcaaacttcacctcccgggctcaagggatcctcccacctcagcctcctgagtagttgggactataggcacgtccagctaattttgtatttttagtagagacagggtttcaccatgttggccgggctggtctcaaactcctgagctaaattgatccacctgcctcggcctcccaaagtgctaggattacaggtgtgaaccaccatgcccagcctctgaaaataattttaattttaaaaaaataatgacagtgggattggcacctactcatatccccatatgtccaacgcgaagttggtctaccttgttcttgctttgaagctgacctccccacagagttacgatccaagagccaacagtccaacagccaatattattagggaaagtaattctaatatttactaaagcccctaggagaatttcaacaagtatcctacacacgttctgtgtggctgataggaaggattttttttttaagagacagggtctcactccgttgtccaggttggaatgcagtggtgcgatcacagctcactgcagcctcaacctccagggctcaagtgatcctcccacctcagcctcctgggtaactgagaccacgggcatgtgccaccaatcctggctaatttttttaaattttttgtagatataaggtcttgctgttttgcccaagctggtctcaaacttctaggctcaagggattctccaaccttggcctcccaagtagctaggattataggcatgagccaccgtgtccaactccagtgccaagcaggtgatcaagaagtgtttgataggccgggtacagtggctcaggcctgtaatcccagcactttgggagaccgaggagagcagatcacttgaggtttgagatcagtctttccaacatggtgaaaccctgtctctactaaaaatacaaagactagctgggcatggtggtgggcaccagtaattccagctactcaagaggctgaggagggagaattgctagaacccaggaggtggaggttgcagtgagccgagattgctccactgtgctccaggctgggtgaaagagtgacactccatctcaaaaaaaagtgtttgataaatttatttatttaataccgatttattgattgattgatactcttcggagctttccttaatgagccagtttcttccataatgcaatgaatgaaaggacctctcagattcaggcatctgagtgcccgactggagtctgggaccccccagacctctctgcctgggagcttccatgaagctcagcctgagctggaaggagaccgtagggagatgtcctagtgagagtgaatccctagtcactgtttcctcttcttacccactcgatgatcccaaagcacacccatctccaaaagaacaggtcacatgtggcagaggagaaacaaaataattagcatccgcttccttaacaaggagctatggggacgaagtctcctagagtccccagactataaataccctgatgttcccctggctcccccactcacctgcagagtctgggggcgggggggtacacatatgaatccttcccatagacatcaggctaaccccagcgatcacaggtgagtagcccccatgcccttcctaggggtttagtgctgacctcgggatcctctagcagttggtggagaaggaggcttcccgggaccctccccttggtgatgccatcctggtgagcaggtgagggatggggaaaggattgagctgagggtgggggtggagggttgtgggagaggaatctgtctccttcctagaggccgagagagagagaagagactgagaccaagtctagactctctgagtggacaaagcacgcagacggcagaccctctgtggcaggatatgtggaggaaaagcactgagggtctgcagctgcaggacacctgcacagataggagaggtcttgagaaacaagtttctccaatgcagcagctccccaagtgtggtccctgggctagaagcaccagcatcctctggaaactatctagaagtgctggttcttacaccagacatttcagggaaagggcttagctttttgtgtatgatgagtttgggagcgggggggagggggcggggggattgttttgtttgtttgtttgttctttctgtttttgagacagggtctcgctctgttgcccagtctggagtgcagtggcattatcatagctcatcgcagcctcgacctcccaagctcaagtgatcctccctcctcagcctcccgggtacctgggataacagacatataccaccatgcctggctaattttattttcgtagaggcagggatcttcctatgttgcccaggatggtctcacactcccgggctcaagagatcctcctaccttggccccccaagcagctgggactaacaggtgtgtgccaccatgtccagctaattttttattttgtagagatgggggtctcactgtgttgcccaggttggtctctaactcctggactcaagggattctcccacctcagccttctgagtagctgggactatggaagcatgccaccatgcccagcagattgttttattttttgtagatccagggcgggattgggggtggggtggcctcactttgtctgccaggctggtcttgaactcctggcctcaagcaattctcccacttcagcctcccaaagtgctgggattacaggtgtgagccaccatgcctggcccgctttttgtgttttaacaagccttccaggtgaccctgaagcgtgctcaaggttgagaaccgctgctctatgcaacccaagtcaacaactgaggactgttacaaatatgttgccaggaagggaatcgcagtattctatccagcctagagaaaaccaagcattgcattgcaaaaacctcaagtccaacactaaaaagcctcaaaaagttaacatagggctttgctgaaggcctcttggggttaccaaggagattatgctgctaaccttcctaaaaacccctttcatcggctgggcgctgaaatgatgagattactgggctcacgcctgtaatctcagtactttgggaggccaaggtgggcggatcaccgggtcaggagttcaagaccagcctggccaacaggcttagtagaggcgaaaccccgtctctactaaaaatacaaaaattaatcgggcgtggtgatgcacacctgtaatcccagctattcgggtggctgaggcacaagaatcacttgaacccaggagacggatgttgcagtgagccgagatcgtgccactgtactctagcctaggtgacagagtgagactctgtctcgaaaagaaacacgtgtaaatgcttgtaattgaatatttttcccttgcacgtgttgacagcacagaatttagcttcgaaatgcctcataaagaggtgagagtggccattcttagggaggcagtggagtatgagagtgaaaataagtctaaattcaaaggcgagatcaggcacttgcaagctgagtgcccctggcagctcgctcagccccagtctgctcactgtaaattgtagctaacacaatctccctgtgggagttattgtaagacctatgcattaagaaactggctcctggctggctgcagtggctcacgcctgtaatcccagcactttgagagatcaagccgggcagatgatgaggtcaggagttcaagaccagtctgacaaacatggtgaaaccccatctctactaaaaatacaaaaattagccatgcgtggtggtgctcgcctgtcatcccagctactcaggaggctgaggcaggagaatcttttgaacccaggaggcgggggttgcagtgagccaagatcgcgccactgcactccagcttgggtgacagagtaagactccatctcaaaaaagaaaagaaagaaagaaaccggctcctcatcaggataaatagctaatgcatgctgggcttaataccgaggtgatggcttgataggtgcagcaaaccactatggcacacgtttacctatgtaacaaacctgcacgtcctgcacgtgtatcctggaacttaaaataaaatgataaaattaaataaaataaaaatcatgctgagcagccaatagctgggggaaaaaaaaagaaagaaactggctcctaagaaggtttaacccattacagatatcattattgctgagggcaaaataaaaacacctgtcccagctactaggaaggctgaggtgggaggaacacctgagctcaggaggtacaggctgcagtgagctgtgattgtgccaccgcactgcagcctgggtgacagagtgagaccctgtctcaaaataaattaaattaaattaaatagatcttgtattagataattttgcctaactgtaggctaacgtaagtgttctgagcacattgaaggtgggctaggctaagctgtgatgtttggtaggttaggtatgttcaatgcatttttgacttatatatatatatatatatatatatatatatatatatatatatatatttttttttttgagacagagtttcgctcttgttgccaaggctggagtacagtggctcaatctcagcccactgcaacttctgcctcccaggttcaagcgattctcctgcctcagcctcccaagtagctgggattacaggcatgcaccacaacgcctagctaattttgtattttcagtagagacggggcttcaccttgttggccaggctgacctctcaaactcctgacctcaggtgatccccctgcctcggcctcccaaagtgctgggattataagaatgagccaccacgccaggtctgacttatgacattttcaatgtatgaccccattatcagcctcagaacatctgtacctatcatttcttggtggtgagaacataaaattgactctgagtttctctggtatacaatgcattgttattaactatagtcactatgctgtacaatagatctcttgaattatgcctcccatctaattgaaattttgtattctttgatcaatatctccctaacacccacctcccgcccccagcccctggtaaccaccattctactctgcttctatgagattggccattttaaattccacatataagtgagaccatgtggtatctgtctttctgtacctggctattttatgtaacagaatgtccttcagtttcatctatatggttgcaaatgatagaatttcctcttttttccatggctgaataaatagtattccattgtatattcctaccacattttctttatccattcatcggtttttaacacaaaactgatgttaaagattacatattgttggtggaaggatgaaggggaaggagggttgaggggggaggaaagaaaagagggagatggccaggcgcggtgcctcatgcctgtaatcccagcaccttgggagtccaaggcgggtagatcacttgaggtcaggagttgagaccagcctggccaacatggtgaaagcccgtctatactaaaaatacaaaaattagccagtcatggtggtgcgtgcctgtaatccccgctacttgggaggctgaggcacgagaatcacttgaacccaggaggcagaggttgtagtgagctgagatcgtgccactgaactccagcctgggtgacagagcaagactctgtctcaaaaaaagaaaaaggaaaaagaaaacagggagagaacacaggaaaggaagagaaggaaaaacagaagatggtcaggttccctttactgtatagagtttttgttgaggtttgattctgcttgattttctttttttatttttgttttttgttttttgtttgagacagaatcttgctctatagcccaggctagagagccgtggcacaatctctgctcgctgcaaactttgcctcccgggttcaagctattcacctgcctcagcctctagagtagctgggattgcaggcgcccaccaccacgcctgattaatttttttgtatttttagtagagacggggattcaccatgttggccaggctggtctcgaactcctgacctcaagcaatctgcccgcctcagccttccaaagtgctgggattacaggcgcgggccacttggttttgttttctatgaagctttgctccactgaaggaagcaaaagtgtttatagagaacatccaagttgactatgagcgactccgttagatccttgagaccctgactgtctcaggcatgaatgacttggcttgaggagcaacagaagcccactgaagatggcttgaggttaactgaacacaaaggaatttgatggatttgatggaattttcacagaacagtataggtttccgtgggaagctgggaccagaatggcatctctgacacctggctctgtgtggtttttctccctttttgttcccactagtcacagaccatacatggaaccagaaaagcaaaccgaaatctcagaattcttcctccagggactctcagaaaagccagagcatcagaccctcctcttcacaatgttcctctccacatacctggtcaccatcattggaaatgccctcattatcctggccatcatcacggactctcacctccacacacccatgtacttctttctcttcaacctctcactcgttgacaccctattatcctccaccaccgtccccaagatgctagcgaacatccaggctcagagcagagccatcccctttgtgggctgcctcacccagatgtatgccttccacctgttcgggaccatggacagctttctcctggcagtaatggccatcgaccgcttcgtggccattgtccacccacagcgttacttggttctcatgtgctcccctgtctgtgggctgctgctgggagcatcatggatgatcaccaacctccagtctctcatacacacctgcctcatggctcaactgaccttctgcgccggctctgaaatctcccacttcttctgtgacctcatgcccctgctgaagctctccggctcagacacgcacaccaacgagctggtgatctttgcttttggcattgtcgtgggcaccagcccattctcctgcatccttctctcgtacatccgcattttctggacagtctttaagatcccttctactcggggcaagtggaaagccttctccacctgtggcttacacctcactgtggtgtcactgtcctatgggaccatctttgctgtgtacttacagcccacatcccccagctcctcccagaaggacaaggcagccgccctaatgtgtggggtgttcatccccatgctcaacccctttatctacagcatacggaacaaggatatgaaggcagccctggggaagctcatcggcaaagtggccgtcccctgtcctaggccagaacagttattggatgtttatcatgttccaggatcactgttggctgctagggacacagagatgcatcccatcccctaccctggaggagttcagagtctagctgggaacagagacatggaataaatccttccagtacaacgtgataaatgtgtcataaagagatgaacaaagtgtatgagcacccaaaggaaaggtgtgcattttccccaggatttatcttccccaaaaagatcagaatagcaaggatcaaactggcctgaaattagccctcctggaggatcagccttttaggattgctatgtgaataagagtagttgaaaacaagagacgtagctacactcattttagtattgacaaaggccaggtgtggaagctcaagcctgtgatcccagcattttgggaggccaaggtggaaggatcacttgaggccaggagtttgagaccagcctgggcaacatacagagaccctatctccacacacacacacaaaatcactttagcaagacatggtggtatacgcctgtagtctcagctaatcaggaggctgaggcaggcagatcatttgagcccaggagttcaaggttgcagtgagctatgactgcaccactgcacttcagcagtttgggaaactgagcaagatctgtcactcataggtagatagatagatagatagatagatagatagatagatagatagatagacagacagatagatagagaggataagataagataggtagatagggtggatagataagatatgtagatagatagatagatagatagatagatagatagatagatagatagatatacagatagatacatagatagataggatagataggtaggtaggtaggtaggtcaaccgatcgatagatctatctattgacagacagatagatgattgattgatagatagatcatataagtagatagatgatagatagatagatagatagatagatagatgagataggtaggtaggtcagtcgatcgattgatcaatcgatcaacagatagatgatagatagatggatggatagatagagatagaggaggtaggtagatagatagatagatagataggtagatacagacagcccatgtattagccagtgtttcctaagtgttgtggaagaactttgaaaatatttgcaagtgagattagctcacgtgctgttcgcttagtcagccagcaagcctcagcctcctggggggtcttgagacctccacttgtaactatgactgtggttggggcttactttctcaattcccaacaggcttcctgtctccccacaacccccagtcaaggggactctgatgcagacggtccatcaatcgtagtttgggaacacagaccctagcctagctccaaaatctatgtgtttcctgtgacattcatcgcctgactctgaacccagtatgattctacacgcagggtcagccacagcagatcaggtggcccggggcacttaaaaagttagtgttatgggttgaactgtggctcccaaaaaaagatacgtgggaggccaggcgcagtggctcacacctgtaaactctggcactttgggaggttgagtagggagaatcatttgaagctaggagttcaggaccagcctgaacaacatagtgagatctcatccctacaaaaaataaaaatgaaaaaagaaaaaattacctgggtgtggtggtgtgcacctgtcatcttagttactcgggaggctgagacaggaggacctcttgagccaaggaggtcgaggctgcatgagctatgttcctgccactgcactccagcctgggaaacagagcaaggccctgtctgcaaaagtaataataataaaataaaaaagatatgttgaagtcctaaccccaaggacctcagaatgtgaccatatttgaagatagggtgtttacagaggtcattagattacagtaaggtcattaggttggtccctaatctgatacgactggcgtccttatgaaaaggggagatttggacacaggcacccacacacatggagaccgccacatgaagatggaggcagagattggggtgatgctcctacaagccaaggaatgccagggactgcctgcagaccaccagaagccaggagaggcgtggaacaggctatccctctcagccctcagaaggaaccaaggaatcaaagctgctgacaactgatcttttttttttttttttttttttgagacggagtcttgctctgtcatcccggctggatgcagtggcatgattttggctcactgcaacctccacctcccaggttcaagcaattctcctgcctcagcctcccaagtagctgggattacaggcacccaccaccacgcccagctaattttgtgtttttagtagagatgggatttcactatgttggccagactggtctcaaactcctggcctccagtgatctgcccacctcagcctcccaaagtgctgggattacaagcgtgggccactgcacctggcccaacaccttgatctcggactcttaacctccagaactgtaagacaacaaatttctattgtttaagtcacctagttcatggtaatttttaaatttttttttcttttagagacagacaggatctactgtgtcacccaggctggagtacagtggtgcaatcatagctaaagtgcaacctcacctcaaactcctgggctcaagcaatcctcctgcctcagcctcctgagtagttgggactacaggcctatgccactgcaatcagctatatatatttgtagagacagggtctcactatgttgcccaggctggtctcaaactcccggcctcaagagatctgccctcctcggcttcacaaagtgctgggattgcaggtgtaaaccaccacactcggcctgatttgtggtactttgttgcaacattgctagaaaacaaatgcagttagtttaagaaatgtcagcaacctacaaaacctacaaagtgtcccagtacatcctctcaagtttacaattgaccatgtgttctggccaagggaccctgggctagaactggagaaaaggatgaaggatttagattgcatggattcacttactgggtatcagcatgatgacaataatgatgatgacaaccgagatttattatctgaacaatgctaactcctttatatgcacaatctcaataagtgttaagcaacacccctacaaggtaggtgcagaagtaattgtggttttgccactgaaagtaacagcaggctgcgcatggtggctcacacctgtattcccagcactttgggaggccgaggcgggcagatcacaaggtcagtagatcgagaccatcctgaccaacatggtgaaaccccctctctactaaaaatacgaaaattaggccgggcacagtggctcatgcctgtaatcccagaactttgggaggctgaggtgggcggatcatgaggtcaggagatcaagaccatcctggctaacatggtgaaaccccatctctactaaaaatacaaaaaattagccggacatgttggcgggcacctgtagtcccagctactcgggaggctgaggcaggagaatggcctgaacccgggaggcggagcttgcagtgagccaaggccacgccactgcaccccagcctgggtgacagagcgagactcctcctcaatttaaaaaaaaatacaaaacttagccaggcgtggtggcccacacctgtagtcccagctacttgggaggctgaggcaggagaatggcgtcaacccgggaggcggagtttgcgtgagccgagatcgccccactgcactccagcctgggtgacagagcgagactctgtctcaaaaaaaaaaaaaaaaaaaaaaaaaagtttgtaatttaaaagtttgagcatcactgggctagatgggggtcctgtagataaccgggacccaaataggctttaggtacagagatacaggagaaccagatttggggtgccgctctagccactgtgtccaggagggaaccttcccaaccgccctaaaagctctgaaaactacagttagagaagtggccactaggtggcaataatgtcatttcacaaattggatttaaaacgctttttttttttttttttttttttggtttttggttgttttttttttttccccggaaacttgtattctagctgtgaactggcccaggtccatggcccttaggtgtaatctccccctggaagggcacaacaggtgcaaagtttccatgatgagaaggagcctgtgttgtttaaagaaatcacggagactggtgtggcctgagcccagagtgacagggaagctgggtttgcagggggcccgtggagggcactgggagtaacacggtgtgtggaccacggggagtgggaccatgacaaggtttaaggaggatagggggtggggctgtgcttcagaacgaacctgccagttatccatgccatagatctggagtcagcaaactttttctgtcaaggtccaggtcgtcaatattgtcagctttagggaccttaccatctccgttgcaatgactgaactctgctgctgtctggcgaaagcagccatagatgagacatcaacgaatgggcttggctgtgttccactaaaactttgtttataaacacagaagcttccatttcatatcatagtacatgtcataccttgtagcctttgggtttgttttcaaccacttttaaaatgttaaaactactctaggccaggtgcattcactcatgcctgtaatcccagcactttgagaggccaagggaggaggattgcttgaagccaggagttcgagactggagtgggcaacatagtgagacctcccccatctctacaaaaattttttaattagctgggcatggtggtgcatgcctgtagtctcagctactcaggaggctgaggaaggaggatcacttaagcccaggaggtcaaggctgcagtgagctatgattgcaccaccgcactccagcctgggggatagagtaagaccactgtctctaaaaaacttaaaaaataaataaataaataaaaataaatgcaaaactatttttatttcaagggctggatttagcctatgggccataggttgccaatcctcgtatagatggatgggagtgacaagagttaaggggaccaagaaagaccaaaaagtgagaggtgaagtgggctgaaaaccatcagaagataaggagctggtgccacaggacctttgcaaatgctgttccctcttcctgacccctcctgagtaaattcctgcttggcattgagatttcagcacaaactccacttcctcaaggaagcctcccctaacctccatcccttgcccagctacatcagttgccctaatgttacactcgctatcccctctctcatcatcactcatcattagtgatctcttcatcactgcagtggttttgtggggtcttttgttttgttttgagacagagtcttgctctgtctcccagtctggagtgcagtggggcgatcccggctcactgtaacccccacctcctgggttcaaatggttctcctgcctcagcctcccgagtagttgggattacaggcacgcatcaccatgcctggctaatgttttgtatttttagtagaaacggggttcaccgtgtttgccaggctggtctcgaactcctggcctcaagtgatccacctgcctcagccccccaaagttctgggattacaggtgttagctgctgcacccggcctcctcactgcagtggttttatattagtttgtgtaaccctttgattaatgtctgtttcacccatttgactgagctgggagctgggacctgaaatagtgttatcttgtttatctttgcacctctgtgcccctatgattagtacggtagccactcaatgtatgttttctggccacgcaccgtgcctcacacctgtaatcccagcactttgggaggtgaaggcgggcaatcacctgaggtcaggagttcaagaccagcctggccaaccacggccaacgtgatgaagccccatccctactaaaaatacaaaaattagccaggcgtggttgcacgtgcctgtaatcccagctactcaggaggctgaggcaggagaatcgcttgaacccgggaggcaaaggttgcagtgacccaaaatcatgacactgcactccagcctgggcgacagagcaagactcttgtctcagaagaaaaaaaaaaacaaaaaacactttttttctttattttaatttaatcttattttattttatttattttattttttgagatggactctcactttgtcgcccaggctaaagtgtagtggtgtgatcttggctcactgcaacctccgcttcccgtgttcaagttattctcctgcctcagtctcccaagtagctgggactacaggtgcccgccaccatgcccagctaatttttctatttttagtagaggcggggtttgaccatgttggccaggctggtcccgaactcctgacctcaaataatccacccacctcagcctcccaaagtgctgggattataggcatgagccaccgcacccagccacaaaatatattttctgaatgaatgaatgaatgaggcagtgtgatggaaaggttttaggaataccggatggggcagccaaagtaggctgctgagttggaacaaagatacctgcagtcaaggttaagtgagagatgcactcctcctttgatatccccaaccttcagttatgcctgtcccacactcaggtgccttgtgggactgggactctgctgaaattaagaagccaggggcctcatcccacagagcaaaaccagcaagatggcgggactccttaattcagcaacaacaaaagacagaaaataatctggaaattctctaaaatcttagcaagcatgctggaagaggtttgagccaatcttatccagtaaattttttttttttttttttttgagacagggtctcgctctgtcgcccaggctggagtgcagtggtgtgatcatggctgaatgcagcctcgacctcctgggctcaagcaatcctcccacctcagcctcctgagtagctagggctataggcacgcaccaccacacatggctaattttttttacttttttatagagacgaggactcactatgtggcctattccggtcttgaactcctggcctcaagccatcctcccaccttggctcccaaaccgctgggattacaggtgtaagccactgcacacggcccaagcctatattaagagtacaagaacagaccgggcacagtggctcacgcctgtaatcccagcactttgggaggccaagatgggtatattacctgaggtcaggagttcgagaccagcctggccaacatggtgaagcccccatctctactaaaaatacaaaaactagccaggcgtggtggcatgcacctgtagctccagctactcaaggctaaggcaggagaatcgcttgaacctgggaggcggaggttgcagtgagccaagattgtgccactgcactccagcctgggtgacacagcaagattctgtctcaaaaaaaaaaaaaaaaaaaagtacaagaacacttccttctctccatgtgaaattttattgggtgattcaaagcaaatctggagattcgggaactgaggctcagagacgaaaagtgaccaccccaaggccacatgccagatctggggcagagtgggggaatccagcccaggctggtgtgacctcaaaacccagcctctccctccctcatgatgctggtagcctcccaggtgggtgacttgcccaaggtcacactgcagcttggagcaactcaaggcctgtcccgggaggagggagcagcccctgtgtgggactctggggagtgaaaagcggacaagccagcaggagtggccactttctggaaagtgtaagaaagattcactaagatttgggctgaagttcgcagagatggattgggacaatcctcccaactgtccatttgccaggaacttggcaggaaatggaggtggttttgtttgtgtaaacctttgtggctggggatcccaaaggcatccctcacctttaatgatttgctagaaagactcacagaactcagtaatgttattatactcatggtttattgcagtaaacagatacagattaaaatctgcaaagggccagccacagtggcttatgcctataatcccaacactttaagtgagagatgcactcctcctttgatacccccaaccttcaattatgcctgtcccacactcaggtgccttgtgggactgggactctgctgaggcaggaggatcacttgaagccagaagttcgagatcagcctgggcaacatggccagaccctgtctctacaaaaaattgtaaaaattagccaggcgtggtgatgcacacctgtagtcccagctacttgggaagctgaagtcggaggatcactcagatctaggagttcaaggttgcagtgagctagaattgcacaactgcactccagatgaggcaacagagtaaccccccccccttttttttttttttgagacagcatctagctctgtcacccaggctgggatgcagtggtgtgatcacagctcactgcaatttctgcctcctgggctcaagtgatcctccctccttggcctcccaaagcaacgggattacaggtgtaagccaccacacctggcccccattaaaaaaaaaaaatctgcaaaggtaaaaggcagatagagcagcatctaggagacaccaggcatgagcttccagctgttccctcccagtggagttgtacagacatagacaatgctgaattctcacagccacaatgtgtaacaacaggtgcagagtgttgctaaccaaggagctgacccaagccttggtgttctgggttgtttttgtttgtttgttttttgtttttgtttttgtttttttgaaacggggtctctctctgtcacacaggctggagtgcagtggtgcgatctcggctcactgaaacctctgcctccagggttcaagcaattctctgcctcagcctcccgaggagctgggattataggcgcccaccaccatgccccgctaattttttgtatttttagtagagatggggtttcaccatcttggccaggctggtcttgaactcctgacctcgtgatccacccgcctcggcctcccaaagtgctgggaggtgttctgggttcttattggaggttggccactgtattacaatagttcccgcttcttcatgaggtttcagttacctgctgtcaacagcagtccaaaaatactaaatgaaaaatttgagaaataaacactttgggttgggcatggtggttcacgcctgtaataccagcactttgggaggccgaggcgggcggatcacgaggtcaggagattgagaccatcctggctaacatggtgaaaccccatctctaataaaaatacaaaaaaaatagctgggtgtggtggcgggcgctgtagtcccagctactcaggaggctgagacaggagaatggcgtgaacctgggaggcagagcttgcagtgagccaaaatcacaccactgcactccagcctgggcaacagagtgagactccatctcaaaaaaaaaaagaaagaaaaagagagagaaaaaaaaataaacaattagtaagtttttttgtgggtacatagtaggtgtatatatttatgaattacatgtcatattttgatacagggatgtacacatcagggtaaaatgggtatccatcccctcaagcatttatcttttgttttacaaacaatctgattatgctctgtaagttattttcaaatgtacaattaaattatttttgactacagtcaccctgttgtgctagcaattcatacgtttttggttttgggttttgagacagtctcactccgtcacccaggctggagtgcagtggcacaatcttggctcactgcaacctccacctcctgcattcaagcaattgtcctgcctcagcctcccgagcagctgggactacaggtgcccgccaccacacccagctaatttttttgcatttttagtagagatggggtttcaccatgttggtcaggctggtctcaaactcctgacctcaggtgatttgcccacctcagcctctcaaagtgctgggattacaggcatgagccactgcgcctggccacaactcatacgttttaaagtgcgtgccattctgagtagtgtgatgaaatcttgcaccattccactccatcccagctgggatgtcaatcctccctttgtttggcacatctgcactgtaaacaccccacccatcagtcccttactagccatggcagttatgagatcgacaaaacacagtatagctagggttctgtactacccacggtttcaggaatctaccgggcatcttggaacatgttccctgcagataatggaggatcactagtgtcctgggactaccataacaaaataccacagcctgggaggcttaaacaacagaaatttattttctcatagttctggaggctggaagttcaaggtcaagttacgttggtagggttgttctgtggcttctctccaggccttgtaagtggctggctgttccctgagacttcacattgtcttccttctatgtgtgcacacatctgtatccaaatttcctcttctcgtaaggcactagtcctactggattaggactcaccctaaagacgtcattttaacgtaattacctctgtctctagctccggggtatttctccgccaactcaccatgactgccacagaagtgctgagctctgcccaaacctgaccggtccctccacctgcattttgtctttcaacgaatgggtctgtatgtgcctgcgggtggttaacccaccaggtaccaaaagcacagcgtatcaggcctgcagccaacgagaaagaaaattggaggaagaaaaatacatacatgtggggctgggtgtggcggctcatgcctgtaatcccagcactttgggaggccaaggtcgggggatcacttgaggtcaggagttcaagaccagcctggccaatatagtgaaaccctgtctctactacaaatacaaaaattagctgggcgtggtggcacaggcctgtaagatcgcaccactgcactccagactgggcgacagagagagaccctgaaaaaaaaaatagaaaaagaaaagaaagggaagggaaagggaagggaagggaagggaagggaagggaaagggaaagggaaagggaaaggggaaggggaaggggaaagggaaagggaaggaaaggaagggaagaaagaaagaaggaaagaaagaagaaagaaagaaggaaagaaagaaagagaaagaaagaaaggggaaggaaggaagtagagagagagaaagaaagaaggaaggaaggagagaaagaaagaaagaaaaggaaggaaggaaggagagagaaagaaagaagaaaggaaggagagggagaaagaaagaaagaaagaaggaaggaaggagaaagaaagaaaggaaggaaggaaggaagaaagaaaatacatacatggccaggagcagtggctcacacctgtaatcccagcactttgggagaccaaagaggaagagaagactctatctccaaatacagtcacattctaagggaccgggagttaagacttcaacataggaatttggcaagggactgaaggggacataatttggcccatgggtgtccaatcttttcatttccctggaccacattggaagaagaattgtcttgggccacacataaaatacactaacactaacagatagctgatgagctaaaaatcgcaaaaaaaaaatctcatagtgttttaagaaagtttacgaatttgtgttgggtcacattcaaagccttcctgggccacatgcagcctgtgggtggcgggttaaacaagcttgatttagcccataacagccacatagtatggctgaccatttgtgtgactgaccttagctactcagcctcaagcccctcgagaggtcaaactgacacagtgaggcccaaggcctccaccataaaacacgtttttggcataaactctctggtgtgacctccaggtatacaaagagactctcatcacacaggatactccaccagcttgaaggcaactcttcaggagccagacaagggctagactttactttggaatgtgcaggagagcccagaagcatgggaggaaggaggcaggagctaagcctgatgtgggatctctgtcaaagccctgcccacccagccacctgtcctcacctgatcagccacctctctgcaggctgctcctgcttcctctggtacacccagcctgtagagtctagggggtccacaccagcacaccaggtctgggagctggacatcagataagctttgtttaagagacagggcctcagctgggcacggtggctcacacctgtaatcccagcactttgggaggccaaggagggcagataacttaaggtcaggagttctactaaaaaatacaaaatctagccaggcatggtggtgggcgcctgtaatctcagctactcaggaggctgaggcaggagaatcgcttgaatctgggaggcggaggtttcagtgagccgagattgcgccactgcacttcagcctgggcaacaagagtgaaaaccctgtctcaagaaaaaaaaaaaaagagagagagagacggggagagacagggtctcgctctgttgcccaggctagaggcagtggtgcagtcatagctcattgaagcctcaaactcctgggctcaagtgatcctcctgcctcagtctccagaatagctgagactacaggtgtgaaccaccatgtccagcttggagagctcttggcatggctgcagtggccagttgctgagtctatccctgaggctgtgcaggggcctagccagcaggaaagctccacagccttgcagctgataaacagagaccactctggaggtggcatggagcaactatggacccctcctgcacctcagtttcagctctatagctgtctggccagatttttccaagggtcaatgggaggctctggtcaagcaatgctgtaccactgactgtcacccaggtgagactgtgccctgcctcaggaagctgctttatgctaacagaattcataaccatttcattatatacaatcatcccctctccctccagctcctgaatgctactgtgatggatatctctgggcagccacccctttgctggttcctctgaggtctgacttccagccagggaggcctaggcaggctgaggtattcaccttcttctcctggaagatgccagatagacgcaagcctcaggtgtggaaacaaatgggaatgaccacagcgggtggaggaagcttgggtcctgctccccaaaaccttctctatctcccatcccccaggaactgagcaccccagggagctggtagaatggagatgtagccccacagaaccacgccccatgcccatagccttgaaaacagcctaatttattattccctttgcacatgaaacagaggcctagacagaatgtctgtgtttggagtccaccagaagccaaccttgagacaaggattcaagtatttaggaaataaacaggaaatactgtaagtggggtggatatgtgggagagggaagggaaggaagtcagcaaagagtgtattgataaccaggtttctacagtggacagctggagctcaatcccgtgggtgaacactaggggtcagtgtagaacatgaacctcaatcatccaacacaagggtgagggagctggggtatttatccatcaattccccttgactaccacagaggtgctgagctctgcccaaaactgacaggaaatggtcttttggtctttcaactaattggtctatatgtgtctggggctggttaatccaccaggtaccaaaagcacagcacatcagacctgcagccaatgagaacatttaggggaaagaaaacacacacgtggccaggtgcagtggctcacacctgtaatcccagcactttgagaggccaaggaagaaggatcgcttgaggtcaggagtttgagaccagcctgggcaacatagcaagatcctgtctctacaaaaaaaatttaaaagctagctgggtatggcagtgcatgcctataggcctagccactcaggaggctgaggcaagaggattgcttgaacccagaagttcaagtctgcagtgagctatgatcacaccaatgcacaccagcttgggtgacagagggagattatgtctctaaaaataataaggccaagcacggtggctcacacctgtaatcccagccacttggggggccaaagtgggaagatcacttgagcccagaagtttgagaacagtctaggcaacatgatgagaccctatctccacaaaaaaatagaaaaatcagcctgtggcatggtggcacatgcctgtagttccagttgcttgggaggctgaggcaggaacatcacttgagcctaggaggttgagggtgcagtgagttgtggtagtgccactgcactacagcctgagcaacagagcaagaaaaataaataaaataataataataaagtaaataaaaataacatgaaaataatttttaaaaaatttgagacagagtcttagtcacccaggctggagtgcagtggcacgatcttggctcactccaacctctaccctctgggttcaagcgattcccctgcctcagcctcccgagtagctgggattacaggtgcctgccaccatgcctagctaatttttatatttttagtagaaacggggtttcaccatcttggccaggctagtcttgaactcctgacctcgtgatccacccgcctcagcctcccaaagtgctgggattacaggcatgagccacagtgcccggccatgaaaataaatttttttaaaagaaaagaaaatgggccaggcacggtggctgacccctgtaatctcagctctttgggaggccaaggtggatggatcacaaggtcaggaaatcgagaccatcctggccaacatggtgaaaccccatctctactaaaaatataaaaattagctgcacgtggtggtgtgtgcctgtaatcccagctactcaggaggctgaggcagcagcatcgcttaaaccagggagtcacaggttgcagtaagccaagatcgtgccactgcactccagcctgggcaacaaagcaagactatgtctctataaaagaaaagaaaagaaaatgtacgcatacaggctctaaaatctgtacagcaactagcaaaatccacaggaataagcatacaaacatcattatgaaacttagaattcataaccatttcattacatacaatttgcagataatctgttctcacttatggaaatttctgattgctaagaaagaatcagagccaatggtgaattaaataggctacatgcaggcaaataaagacaacaggaaaagtacaaaaactcaaaaagatttacacaaaataataataataaatatttatgtggtatgtgggtgtcatatgggtggggctaagggttgctctcactcccatgtcagaccccagctcctctgagactctgaaataccccattgggaccttagtcctgcagcctctaccctcaacttgtaaacaggtattgtcttgacccctgacttctttccccattgtcaatagctgcctcaaagacatctgcgcagggatctcatagggaggagggtgcactccacccttttacagactgatgccccccaaacacacatatccaagaaaagtgaacagcacctaggagaactgtatatcaacagttgtataatgagtataccaatatatgcataatgagagtcccagaaggagagaagtgaaaggagcagaaagaatatttgatgaggctgggtatggtggttcatgcctataatcccagcactttgggaggccaaggtgggcagatcacttaaggtcagaaatttgagaccggcctggccaacatgacgaaaacccatctctactaaaaatacaaaaattagctgggcatggtgacaggcacctgtaaccccacctacttgagaggttgaggcaggagaatcacttgaacccagaaagcagaggttgcagtgagccaagaccatgcctctgcactccagcctgggcaacagagtgagactccatctcaaaaaataataataataatatttgatgaaataatggccaaaaaacttcccagaagcccagaattgatgaaagacatgaatctacatatccacaaagctcaacaaactccaagtacaataaacacagagaaccacacaaagacacattaaaaccaaacacacacagcctcctcgtccaggcctcttggacaccccctcctatacagacctccatcacctgacacctgatctcctacctgaatattcagcagtgaacaacatagacaagcatcacttgatcacttggtggagacccagtctggacgaggaggcagataaactagaacaaaccactgggactgttaaattcaagttgtggcaagtgttagaagaaaggaaactgagtaatgtgatactgactagacagaggtggtggacagaaagggtctccctagaaggtgccattggacctaaaggatgagagagaggtggcctcagaagaaccagggcttcccaggcagaaggaaccatgtgtgcaaaggacctgaggcagaaatagcttgatatgaaggagaaccagaaaggaggccatggtgagtgaatgggacagccaaagagatgaggctggaagtcttgtgagaccatgctgggaatctgaattttattctaggtgaggtgagcagtcataggaacactattcagcaggatggtgccacaatctgatttcagttttaagtccactgtgggtaatatatggagaatgaaatgtagggctaagacaggttatattttcccagatggccacaatatctcccaccctacatccacttgtacaatgtcaccttgacatgcctcccatgtagagaggtataatctgtgccccctttccttgaatctggtggcagaagtgacacagcatgacactcaaggctgggtcagaagagatgcaacttcttccttgttcacttttagagggctgggtggctgtctaagaagtctgactaccccaagaccaccatgctggaaggaaacccgaaccacacggagaggcctgtgtagctaccctggtccacagccccagcaacagctggcgtcagttgcaagacctctgagtgaagacacctccagatgactcaggaccctgccattttttagtcaccctctagcctaagtctcccctgtccaaactgaaccacagcatctgtgagcatcatgtaaaccaaaaggtatctcagataagtctcaataaatttagaaagcttattttgccaaggttatggacatgcctgtgacacagacttagaagctcctgacaacataaactagggtagtcagggccactaccttgattcaggtctgtaatcctagctacttggtaggccaaggcgggcagatcacttgagaccaggagggttttttgttttgttttgtttttttgttttgtttttttgagacggagtttcactcttgttgcccaggctggaatgcagtgacacaatattggctccctgcaacctccgcctcccgggttcaagagattctcctgcctcagcctcccgagtagctgggattataggcatgcaccaccacccccagctaattttgtgtttttagtagagaaggggtttccccatgttggtcaggctggtctcgaactcccaacctcaggtgatccgcccgccttggcctcccacagtgctgggattagaggcgtgagccaccgcacccagccgagcccaggagtttgagaccagtctgggcaacatgatgagactctatctctacaaaaagtagggaaattagccaggtatggtgacacatgcctatagtcccacttgctcgggaggctgaggcaggagcatcacttgagcccaagaggctgagactgcagtgagctgtggtggtaccactgcactccaccttggtctagttttatatattttagggagacatgagacagcaatcaatatatgtaagatgcacatgggtttggtctgggaaggcaggacaactcaaaagtagggagaaggcttccaggttataggtggataagagagaaacaattgcattctttcgagtttctgactagcctttctgaatatgcaatttacagagatagtcacttatgccttagtctggcttagtgaaacaaataggtaaggaagcgatcagatatgtgtttgtctcatgtgagcagagggacaattttgagttctgcctgtccttcatccataaggaatttccttgtaggcaaattgtgggggaggtatgtagctttttttttcttttcttttcttctttttttttagacggcatcttgctctgatgaccaggctagagtgcagtggtgcaattttgattcactgcaacctccacctcccgtgttcaagcaattttcctgcctcagcctcccaaatagctgggattaccagtgcccacccaccatgcctggccaattttttttctttttcatatttttagtagagatggagtttcaccatgttggccagcctggtttcgaactcctgacctcaagtgatccgtcgcctcagcctcccaaagtgctaggattacaggagtgagccaccgcgcccagctagcttttttaaccttgtagctatcttacttaggaatagaatgggaggcaggtttgtcctacacagttaccagtttgacttcttccttttggctcagtgatttggaggtctcaagatttattttcctttcacaatcacgacatggttgttttacatcattacgtttggggatggtttgtcaaacagcagtagtaattggaatttggaggtgagagaattgagtggggaaagagtggcatggggagaccaaggaagaagcttggggtggggtgggtagtggggacggtcattgaaacgaatgacactacggcttgcaccaggttgaagcagtacctggcaaggagagagaggatacgtggaggctgcgatttggagacagacccaagagaacttcctggatgccatcacccagagtcccatccagggagggtgggtgaggtggaagacaagggatcgggcctgcgccacgatcgtcacgtcccatcgaagctggagcggatccgggcacccggagcccccattccaacccctcccggccccaggcaactacatctcccagcatcgcccgctcgggccgcgggaaaggggaaaaaaaaaaaaagtttgggccaagcattcccggaatgtgcttcctgctggcgcggggcggggggcgggcggggaggcccgggcggggcggggagggcgcggggcggcgcggccggagcccggggcgcgcactcggctcggcccggcccgggccgcagcatggccgagccgctactcaggaaaaccttctcccgcctgcggggccgggagaaacttccccggaaaaagtcggacgccaaggagcgcggtaagcggagatcggtggggaacagggggcgccgagccccacccggcctgggagcggggtcccagggccccgaggacagacggtgggggggatcagggggagccccccgcaccccgctgcagactggggtgcctccagccaggggagggtaggggtcctggaaggaaggggctgggagggaggggggcgcggaccgttatgtgctgctggccggggatgccagcgctgcgggctccttgggaggcccgggagggggcctcgcccacgacaggaaatggggccgcgactgagggcctggagggtggaggggaggaggggctgggaggccgggacactggggcccagtcgggctgggcaaggggcatcgggagccctggaggcgcaggatgggagatgggaggcgtactcctgcaaaggaaagagaggggcggcccgtcaatcagagtagctgccccctccgcctcccacctactaacagtgacggcaactgcgcctgccttagccccaggaaactgtcccttttatacagatggggaaactgaggcacggagcaattgggtcatgtgcccagggccatcgacttaaacagctctttggactatgctacaaacagagaccctagagggtggacatcagaggtggccagaggaggagttcagcagggtagcaagtaaaaaccttagagaaacagctgcgtgggatagggggacccaggaaggaaggagttaaaggaggaaggccagaccattccatggacgtaccccttccccccaggccttcccaaagattcccaatgttcccagggaagggagaagggacagagatgcccaaacacaaacacacacaggaaacagcccaggacatgagacaggagaggagggagggaaggggaagtcccaaagcattgagcgtggggggtctggcctgggctgagggacaagggcccatcccaggatggcgacagagtttggaagacaggagggagggtaaaaggggcaggggactgggagtgactgtgctgcagggaatagaaaacccagctcctcactcctgagcacgtagtgcctgctgtgggctgtatacttttccaaaaggctcctggaagcctccctggacatggaaatcacatccccccatttcacaggaggatactgagcctcagagagggaagcgacttgcccaaggccacgcaggtgcaaagctccatgccacggttattgagagggtagaggaagtggagactggaacgcagtacctacgggccccaggaagcctgacttagaaccctgaggctgcagggatggagtccccttttgggatgccagggactgagtagggggtgctctaagctgataactgagatcgctagcctgtggctgcctattccaaacaaaacagcaggatccaaggaaccatgacttatcaggggccggccagggccgtacacagcatcccacccactgatcaattgcacagggctgctctgcaggcagtgaggggctgggtgggtctcactccccttgctctctgccaggccacccagcccagcgcccagagcccagccctccagagccagagccccaggctcccgaagggtcccaggccggagcagaggggccctccagccccgaggcatcaaggagccctgcacggggagcctacctgcaaagcctggagcccagtagccgccgatgggtgctgggtggggccaagccagctgaggacacctctttagggcctggggtacctggcactggggagcccgccggcgagatctggtacaaccccatccctgaggaagaccccagacctccagcacctgagcccccggggccacagcctggctcagctgagtcagagggcctggccccccaaggtaagaacaagcttcccatccccttccccaaggtgagcaccagctccacatcccttcccttcagggtagcaccagcctcacactccctcctcccagaggagcaccaacctcacactccttcccttcaggggagcaccagcctcacatccccaccccgtcagatgctcccagaggagcatcagcctcacaccctcctccccgccaggggaacaccagcctcacactccttcccttcaggggagcaccagcctcacccccctcccctaagcccaggttcctggaccctgaagtctgctctccacacaggtgcagcccccgccagccccccaaccaaagcctcccgcaccaagtccccgggccccgccaggcgcctctccataaagatgaagaagctgccggaactgcggcgccgcctgagcctgcgaggcccccgggctggcagggagcgcgagagggctgcccctgcgggctccgtcatcagccgctaccacctggacagcagcgtggggggccccgggccggcagcagggcctgggggcacccggagcccgagggccggttacctcagcgacggggactcaccggagcgcccagctgggcccccatcacccacctccttccggccctacgaggtgggtcccgcagcccgggcacccccggccgcactctggggccgcctcagcctgcacctgtacggtctcggggggctgcggccagcgccgggggccacccccagggacctctgctgcctactgcaagtggatggggaggccagggcccgaacagggccactgcgaggggggccggacttcctgcggctggaccacaccttccacctggagctggaggccgccaggctcctgcgcgccctggtgcttgcgtgggaccctggcgtgagaaggcaccggccctgtgcccagggcaccgtgctgctgcccacggtcttccgaggtaggacatgcggctgcaggggaggaggggcagggacccccaaaccccaccgccaccccccgcagagtgcctagggggctgggctccgggcggaaggtgtggcctggagcagcgaggccagggtacatgaagcttcagagcacacccggctcaggcccccttgtgtcctcagggtgccaggcccaacagctggccgtgcgcctggagcctcaggggctgctgtatgccaagctgaccctgtcggagcagcaggaagcccctgccacagctgagccccgcgtctttgggctgcccctgccactgctggtggagcgggagcggccccccggccaggtgcccctcatcatccagaagtgcgttgggcagatcgagcgccgagggctgcgggtgagcacccaccccaccccaaccctctggcccccagacctcagaccactcttcaggacaccctatgtacagatgccagacccctacccccaggcctgagccactcctagctccaatcccaacctagacaagggcagaaggcgcccccttgactgtagcaccctgggcagaacccatgggtcatccattgatttaaaaacaggatccaagccctcctggggctcagagtctgatgggggaaaagatacgactctagtcattcacaaatgtaaaactataactgggactggagttggggtggggtgtacctagggtctgggagagcttaaaacaaaacctggggtagtcatggaaagcctcctcaaagaagtgtcagtttcctaagtcaaaggagatggcagccaagacaagtagtccaagcagagggtttacaaggccaggttgtcaaggtagttccaacctcccagcccacaatgcccattgctgcctggcccagaattccagtgctcaccccactgggccctgattagtctgtggccccggcaagaagacattcactctctcttcccacccccaggtagtgggactgtaccgtctttgtggctcagcggcagtgaagaaagagcttcgggatgcctttgagcgggacagtgcagcggtctgcctatctgaggacctgtaccccgatatcaatgtcatcactggtcagcatggccccctctcccctgcctgctcacccccattcaatgcctcacttcaaggccttggggctcctctgggacctcagtcctcctatctgaccttgctttcacccacctcctcttcccccttagctgtgccctccttagccttagaagccagtggtgccctgaccagaggggaccctgtgttcacaggcatcctcaaggattatcttcgagagttgcccaccccactcatcacccagcccctgtataaggtggtactggaggccatggcccgggaccccccaaacagagttccccccaccactgagggcacccgagggctcctcagctgcctgccagatgtggaaagggtgagttgggcctggtgggagtgatgggacttgagagtgggctgataccaatagaatgtttcacccatgcctgggcctgagatgggcatgagctggcagcatcatcatatccccaagaaataggtgctattagcatcccacttcatagatttggaaactgaggcccaaagcaggtgacagttgcccaaggtcacacagccaggatgtgtcaaaaatgcaggctgaacgctgatctttcaacctacaagggaggttcctggctgagggaacctagacaagtcccatccctctctgtgcttcaatatcttcatctgtaaaatgagattcatggcagctctgcttttccaatgcttagttgcctttggcttcagtcttccctccaacaaaataggctcataatactaacatctaatgattaatagtcttaacccgaccacatcccagctatgagactgtgaacctgcttccctactctagccaccttagtctcttgcaggtaggtgccacaggggcctgactttgtctgacttacatcctctcaaccctctcccaggccacgctgacgcttctcctggaccacctgcgcctcgtctcctccttccatgcctacaaccgcatgaccccacagaacttggccgtgtgcttcgggcctgtgctgctgccggcacgccaggcgcccacaaggcctcgtgcccgcagctccggcccaggccttgccagtgcagtggacttcaagcaccacatcgaggtgctgcactacctgctgcagtcttggccaggtgagttcatgcccagggcctgcaccaccaatctgagccaggctgctacagtgatgccaccttaagggaccaatcagtgtcttaggcttgaagctacgccccctcatggagtaaactggtacctggttgcctcagcaaccagttcagatccaaccaatctgtctgttttgtctttttttattttcatttttttgtaaagacagggtttctctatattgcccaagctggtctcaaacgcatgatctcaagccatccttccgcctcagcctcccaaagtactgggattataaaccaaatcaccttgccccacagagctgattcatctttttatttttattttttattttttttgagatggagtcttgctctctagcccaggctggggtgtggtggcatgatctcagctcactgcaacctctgcctcccaggttcaagggattctcccacctcagcctcccgagtagctgggattataggcacgcaccaccagtcctggctaatttttatattttaagtagagcagggtttcactgtgttggccaggctggtcttgaactcctgacctcaagtgatccacccatttcaggcctctcaaagtgctgggattacaggcatgcactaccaatcctagctaatttttgtatttttagtggagatggggcttcacggtgttggccaggctggtcttgaactcctgacctcaagtgatccgcctgcctcaggcctcccaaagtgctgggattacaggcatgatccaggcatgatccacagacctgcccctacccatctttgatgcagtcagaggccctgcctcttgacatgccaatcagaggcctagttgcgtaagcaaccagtcctagctctgccagtgaaaacctgaaagggtcgaaggccgctttccacaggccaatcaggagcctagttccctaagcagccaatcagaggtcggctgtcgcctctttctatgacctaccctgtctcccttcagatccccgcctgccccgacaatctccagatgtcgcgccttacttgcgacccaaacgacagccacctctgcacctgccgctggcagaccccgaagtggtgactcggccccgcggtcgaggaggccccgaaagccccccgagcaaccgctacgccggcgactggagcgtttgcgggcgggacttcctgccctgtgggcgggatttcctgtccgggccagactacgaccacgtgacgggcagtgacagcgaggacgaggacgaggaggtcggcgagccgagggtcaccggtgacttcgaagacgacttcgatgcgcccttcaacccgcacctgaatctcaaagacttcgacgccctcatcctggatctggagagagagctctccaagcaaatcaacgtgtgcctctgagccagatgacggggtgggaccccggttagtaaggaccgggcgcccagtggctaaggcggtgccctggtgaccaaggagagccagacctgttgctcaggccgagctcctggttgccagcgagttaccacgggaccagtcgcgtgtatggctgagactcattcccagtttccagggcccggtatttggacactagttgccaagtctggggcctggggattttagggaccagcggttgtgaccatctttcctgagcaccaagggcttccccttttgttgccaaaaaggtagttctcgcgcttgctaggctggcctctcttgcctccccttggccggggcaacaccagttactgtgagcatcaccctggtgtggtgagtcacctctagtcggccctcttgctgctgccaaccaaatcagtattagctttgagcactgcactgtttctccctcccttggacgacacaaagactagcatgaggcactgtttgtggggggcagcccctatcctgggttccagcatggacacaggggtagcctggggcttatagagaaacagctggtttcccctacccttttccggggaagtccccacgattggcctctagtcagcaaatggagataacagagtctggcctttccaatccccatctccttgccccccccttgcccccccccccgaaaaaaattgagcacttaaacccctcccttttggagggggccccctgaagcgtcaggctgggggcagtctggtacggaacatatttattgcctccatgcatgtgtgtgtgtgtctgtgaggactggtgtgcgtggacacgtctgaagcaggcgtgtggggctctttcagggaccacagaggagggagcagtttgcagtgcccagccaccctgaaatccccaataatggtgcctcagtgggccccagagttccagtgggagagtacggttccctcctgtctccctcttcttttccgcacctccatctttgtggataataaataaatatgcacaggttctgagactgagtacttgggcctacatgggccagaggtggtttattcagtctccataagagaggggacaaacggcacagttgggtccgtgaagaggagggtccaagagctcacaagagagcctctctgagatttgacccctccatcccctcctcagggaggttgtggagtcactgggcctcatgggataggcccagggcaagcaatgatgagactccaaaccagctggacacagtccaggggcaggaaggcagccaagcgtcctgacccacaaggccctatacagcaatggagccatcgcggaagtccgtcctcccaatgaggatgttgaccacaaccgggtggccgtctcggcactgctgctgggcatcgtgcagcaccttgaccacctgatcctcgttctcccgtgagagcagcaagccccgggcccccagacccatggctgccttgtgataatctaaaagaagagattaagtcggatagtggcaaggactcagcccaccgcacatgcagccagcccaggagaggaacacaagcccagctgggactgaaacagcctcctgtcctcccaacctcgctgaggccccctcaccagtgtaggccaggccacaggccacgttgctgcccagagagggcacctgctcccgagaaatctgtgtccagccagcatcattccctaccaaggccatcactgggatctacaggaagatgatgaaggcaggccgcagccttcagccccatggcttggccagccagaggacagagacagggatagggcctctgccagagaggaggctccctccccacctcagcccacccctggtgacatctcccagaaccccaggccctaagcttccctcaggccagcccagtcaccttgtgtctgacgaatgtatcaaattcgatgaggctgtagccaaaagctccgtccccaaacaggcaccagacctagtcgggaggggacccaggatggttagggtggatcaggacctagagagcagcaagtctcccaactccagtgcctcacctcagcatctggccggcacagcttggccccaagtgcaaatcctgcaccaactcccagagtcccaaaggcccctaagaggaccaagagcaggtgggtgtgaaggcgtcctgatggatggtgcccactgccccaggcgggggcccttccttaccaggatcgagccagcgcagggggccgcggggctgtaccagatgggcagcagtgcccacgaagtccccgccatccaccaccagaattgagttgtcaggtagcgtttcctccaccagctgcagcacctgcactgggttcaggtgctgggccacaggcatcgctgccttctccctgcgacaggacagcgaaggtcaccagggttggcagcagggtctgccgggaacccccttcccacatccactccacccaggccccaccgaaaggtctgctccttctgccggtcggcttcccgcagctcctccacccagtctggggcccaggtctggccctgaaggccctccactaacttcagcacgaaggaacccacatctcctggggaaggaagaggacacagctgtggggagctggcttcctcctgttcttccagcatcagaggcctcaaaacagcaggaagccagcagcagcatccgagcaggcagacgggaagcaggccaggggtgctcctagaaaaaaaacaggtgaaacaccccagaacctgccagaaccaggggagggcagcccaggtgaaaagggaagacaaggcccaagaaacaagggttaaggagcacaaggcaggtgacaaacccaagctggcctcgtcccctccctccacctccttctgcctgggaaacactcaatgaaaagagctacatccaccaagcacatctctcaaatccaggcacgtggaagcgcacagcgaacgttactgaagtgaactaacaaacagccccgtgatgtatctttcaccaccccatttttcaaatgatcaaatggaggctctgagaaggtgaggctctgccgctgttcatctccagttcaggcctcctcgcttctgtcctggccattttgagcagcccccctggcctccacccagcccccttccggcctgccgtccatggctgctgagtggaccttcccaacacagatgcaacggtgctacttctctgcttaatacaagagtgtcctgtcgcctaggctgcaggggagtcaacatcctcagaatgatgaaccaagttcaagtccaaggggactaaaataaggggaggggagagatacggcaggaagacaggctaaggggccaacgagtgtgctctctgtcctgagggcagtgggcagtgtgggagggaacgtgatcacatgcacgttttcaagcctccctctgtgtccaccccaccatttgttcctacagaagcatctatcaggccgggcgcagtagctctggtctgtaatcccagcacttttgagaggccgaggcaggaggatcacttgaggccaggagttccacgccaacctgggcaacacagtgagatgctgattccacaaaaaaaaattaacaaattagcctggcatggtggtgcatacttgtagtcccagctactcaggaggctgaggtgggaggattgcttttgagcctgggagtttgagggtgcagtgagctgtgattgcactactgcattccagcctgggtgacagagcgagacctcgtctctaaaaaataaaaataaaaaaaatttaaagaaagaagcattcatcagtttgagagccaactatttgtctctggttgactggctacccctagggcaaggtctgggcctcaatcactgtaccaggctcaagccagctgcagcagaaaccaggaggagagggactgggaggagcacatatgtgtacggggggattaaggggctcaccctgcacagcctcctggggcttccagaagatgtctgagttgagcaacatctcttcccgattacgattgacgatgatgatcttgctgctgtggctgaggacacggccataggataggcggaagtcacacacagttcctggtgtgggggacaggaatgcagtaggcagaggccccatgtcgtctaccttacttgatccactgtggtggactggatgcaaatgagtccctgttcctcaccgagtctccctgcacctgtgccacctacagtgaccttgcagctccccacaccccctgaatcgggactggcctcatgacatgctttggccaacaggatagggcagaggcaggttatattttcccagatggccataatatctcccaccctacatccatttgtacaaggtcaccttgacatgcctcccatggagagaggtgcagcctaggtcccctttccttgaaagtgacacaccatgacacccaacaaggaagatatgcagtttcttccttgttcacttttagaggcctgggtggggccaaggaatgtgctctctgtctaagaagtctgactaccctgaggccatcatgctgggaggaaaccggagccacacatagagacctgtgtagttgccctagtccacagcccctccaacagctggcgtcaattgcaagacctctgagtgaagacacctccagatgattcaggacccccaccccccattcctgcagactctacttcaagaagccacacagcctccactcactctcttgaataaccgcactctcctagccccatagttttctcatccttcaccaagtcggccagcccaggctagcctactggaggatgagaaacaagggggccatggagacaggggtgaagaactctatgaccccagctgaggccatcccagacgagctgcagggccagccaatccccatacaggtgagcaagcccagcctggatcagcacagctgccttcctgcctaacccaagtgcagactcatgaatgagcccagccaaaaccacagctaccacctaccttataggtggatcttgagaaatcagaaatgcatttttagccattgagtttggggatggttgttacagggcagtagctatctgatacacctattatgcgtctggttgggttcaaagcgctttatgtgaaaatgtgtatcaagtacaataggtgcccactagaccttcctcctccttcgtgtgaagctgggtaacagggtgagggggttcctgggggaaggagggaaaggaagaggctcaggcccacctgctaggacaatgacatccgccttcttcagggccgcactgcggttctcccggatgtggagggggtggttgcggcctaacagcccccgtgccatccctccaaggaagcagggaacacccaaggtctccacggcagccctgggagtccaggcagagcagaggtcagtgtggccggggcctcccgcctccccaagagcacccgaggactggggactgggaacgtgaaaacaagggcagggctggcgcttctcaccgaagcttgtcggcagacgttggggtgagcagggcctgactccccagcaccatcagaggcctcttggcccggctcaggatctccacacagcgctgaacctggagcgagaggtggggatcaaagggctgtctttttatttatttatttttttgagacacagtttcactctgttgcccaggatagagtgtaatggcatgatctcagctcactgcagcctccacctcccaggttcaaacgattctcccgcctcagcctccagagtagctgggattacaggcgcgtgccaccatgcctggctaacttttgtattttcagtagagacagggtttcaccatgttggccaggctagtcttgaactcctggcctcaagtgatccgcctgcctcggcctccctaagtgttgggattgctgctgtgagccaccgcgtccagccaaagggccgcccttgagtcgccatgagcacccaagattaaggccccagtactgactcagggagagggtcagggggccctctcccctcagggagagggtagggtcctcagacacaaaagagaggcaattcacctgctgcggggaagcctgggggatgtccaggggcagcggtccctcgggctgaggctcccaggctcctgcaaagaggttggccaggtaattctctaaatacctgcaaaagggagggggaagaaaccaagttgccagaattaactaactacaaggattccaggatctgagcaaggaaaggggccgggagaaaagccaggagcaaagtggcatggggacagggtggatgagtgacacctcagggacagacgaaccctagtggccaggtcttcaactgcctgtttgccctcggtagcctctggggtccaccccaactccacgtagccccccagaagcaaggaacgcaggctcagcatgccaggattaagcctgtgggtccaacagatgtgagctcaagtcctggctctgtcacttcctagctgtgcaacttagggcaagtgacttcacccttctgagcttccacctctgtcaatgtaaatatgaacctccctccccaggttcaaggatctgtccacttaggacatgaggcgctttgcatgggagttctgaacactgtcctctcctgcttcaaacagggtcttctcggtctccttgctcactgggccccagggccccaactttcctgaaggacctgtgcagggccctggagacacaaagatagatcctgcccagccctcccctcagggggcgctctatccagcgaaagacagacacatgggcattggcaggaaacagtcggagctcagagtcagaagcctctgctttcaccgttaaggacaggccaagacagcacagaagcagcccaggatggaaccgtgggaagccccgcaagtaaagaaaaggcaagggaggctgaggcaggaggattgctcgaggccaggagttcaaggctgtggtgagctatgatcataccactgcactccagcctgggtgatagagtgaggccctgtctcaaaacaaaacaaaacaaaaaaggcaagataagagatagccttgtgagaggcagcccaagagagaggggcaaggagaacaaggggagggactgactgggaagccagggggcaaagtgcattaagaatgaggctatatgaccaaaatggtgaaacctcatctctactaaaaatacaaaaattagctgggtatggtggactgcacctgtattcccagctactccgggggctgaggcaggagaatcacttgaacccgggaggtggaggttgcagtgagccaagatcgcactactgcgctccaacctgggggacaaagcgagactccgtctcaaaaaaaataaagaggccatagaacaaaatcactactgcctgagctgaccctcaggcgcttcacacacatccggagtacaggagcctgactaccttgtccactgatgatgccccgtgcctgtcctggaacctggcacatggctgccgctcgctaaatgtatggaaaggaagggccaaggacaggcaaagggaagggactgaggggaagggagagaaggaggaagaagaggaagaggaggaggagaagaaaggaaaggaagaagaagaagagaagaggccaggcgcagtggctcatgtctgtaatgtttgagaggccgaggagggtggatcacttgaggttaagagttcaagaccagcctggccaacatgatgaaacctcgtctctactaaaaatacaagtattagccaggtgtggtggcgggcgcctgtagtcccagctactcagaaggctgaggcaggaaaatcacttgaacccagggggaggcggaggttgcagtgagccgagatcacgccactgcactcaagcctaggcaacagaacgaagaatctgtttcaaaaaaaaaaaaaaagaaagaaaaggacaaagatgtgagggaaggaaaggaggaggaaggagagggctcgagtctgggctctgccacttttttttttttttttgagacggagtcttgctctgtcacccaggctggagtgcagtagcacgatcttggctcactgcaagctccacctcctgggttcacgccattctcctgccgcagcctcccaagtagctgggactacaggcgcccgccaccacgcccggctaattttttttttttttgtatttttagtagagatggggtttcaccatgttagccaggatggtctcgatctcctgacctcgtgatctgcccacctcggcctcccaatgtgctgggattacaagtgagagccaccgcacccggcctgggctctgccacttcttagctgtgtgactttgggcaagtgacttcacctttctgagcttcctcctctgtaaatgtaagaatgaacctcccttccgaggttcaaggatcatcctttaggaggaggaaaacggagaggacgatgggaaaggtggtgggggaaagggaggagaagaggaaggaagagggaggaggaagaggaggaagaagagatgatggaggaggagaagaaagggaaaaggaggaggaggagggctgtcctgagcctctcccctttgctgcctccacgagggccgccttgctttccctacccacccagttcattcctgcctcaggacctttgcacatgctgttccttctacctggaatgctctccccccagctgtctcctcccagtccacatgtgaatcaaaggaggatgggtgtgggctggaagctgcaggagagaacgggggataaaggagggaatggcaggggtggggctattcaccaggagaccactcggcccacgaggcccttgggtggcttggctggcaccatctccttctggaccatgaagtaggggtacagcacgtcaacgggcagctccacaaacaccggacctgcagggacagggaggacgctgagtccataacatgtccccagcccctcggccccagcactgctcagcatcaccatcctccacctacctggggtgcccgactgggcggcagccatcgcggccctcagggtgggcacaatgtcccgcaccctccgcacagacacacaaaacttacagagtggccggaaaagggacagctgatcaacagcctggagcgcaccccggttctggcaaagacagaggtgtggcagggttatcgcatgagcccttcaagcccccctaggcccccactggcccccaaggactgggtacctgcagcagagtgctggcagccccacccagaagcaggattggggactgagccatctgagcattcttcaccgcagtcaccgtgttggtgaggccagggcctgctgtcactgccgccacgcccaccgtccctggaacacagagcccatcacagccatgcccactctcttggccattcttccacctctgaaaaacccctaccctcacagacactctagcccacagtccaaccagtccccagccctctctgcaatgccctcaccggacaggcgggccatagcatcagcagcaaagacggccgtgacctcatggcgtgtgtccaccacacggatgcccagtttctcacaggccaccagcagcggggaaatgtgcccaccgaccagcgtgaagatgaaccgcacaccatgggccctcagcacagcggccacgttctctccgccatgccggacgcttgccttgtccacctgggcccaaggacaggtggagcaataaagttaaaggccagggcagagggcagctgggaaagggggcaatccccctgccccaggtaagggggcaggagcagggtgagaggtcaagagaagcttggtcttggttaggcatatattatactacatgccaggctcaaaccaaggcataacatcttatcagatcctcttgtcattacatccctcttacagctgaggacatcaaggcttgcccaagtaagactgaaagttcaatagaacccacgctcttaagtgccccactgttacactgcctgtctccaggatggcagggcaatcagggagagaggagagggttatataacccagggggtttggccaggggcacaacgcacgcagagcagatggcagggagccatctgctgtgactcctccctgccctccagtatccttgcagagcctggcagctgggctcctgatcccagcctccctgatgccctcctgatggacgctaaacaggcccagggcttagttgacaggctgccagccaccatgtgcctggcacgggagtgagctgctggcacagactgtgccgaggcctcccaactccagctgcctcacagccctacacatccaaggcttgctttaaatctcctaagtcctgaaggtcagtggcatcactcctggctagcagaggaagcagtagagaagggtttggggagggagaggtcaagcttggtccctgctaggagagaaagggttgaggaaggggtctggagaaggggtaaatttcaaacagaggtgcaaggagtttagggggacacctgtggggtcagctctctccaaacatgtcacctagggcaaaccaccacacaatctctctgagcctcagcttcctcttgcagaaaatgaagacagaaagaacagcacctactttcaaggaaaaggtaaggggtaggtaagaaagtctacagtactgagctcagcagagggcaactgttatgaaactgtcactgccaccccctcgctggagcctgccctctgccccatttatcccatccaggttagggagcacagagtgctgtccatctgttctgtgaaaagagtcactggggaaggaggtaggtggggtgcgagtgccccggcagcggcagcttccgtgttctctcttaccagtggcaaagtccaggcctccatacacagcgtggcaatggagacagggccctggacagaacctcttaccagtccctctggactagtcggggctcgctttcccaccctgcacaatgagtgagctggaagcagcaccacgaggcccctccctctttgactgcccccagcccacctcccattctgtgccccgcaccttgtgcagcagctgatagaagagccccaggcggtgagcggcgcccagcaaggcggccaccagcgtcccgcaggccaggagcaggaaggaggggaataagctcccagcgggggcggcggccgcgggggtctccatgaggtggtacctaagagagaaagggcacttcccagacttgggcgcgacagggaacctctccggaagaaatcgcgccccttctcgcagcaggatccagggccacgacccttgccgccagtttctgtgcggccacgcccccaaccctgccagaccacgccctttgtgcgcctaggctcggggtgaagccatgcctctccgtgacaaggtcacgcccctcgcggggctagccccagtcctttacatcaccaccactcccacccaaactagccaccacaagtcaaggtggcgacgacagcaccacacagttatcttccacttacctacttgtcaatggacaggcggaagccccgcctctctttccacaaccggaccccaaatctcagccccagtagtgagcccgccccatgttacgtcaccaagaggcacgaggtcacgcccccgggttagcgggcgcgaccctccacgcaacccacgcctctcccttaaagagcgcacgggcccgagcctgatccccgaccccgggccaggctgggtcgaggtcacatcgcatcaggatgtggttctcccacaccagctcgacccccgacgctattcaccttcacctccaggatatggcgctgcctccagcagaattcggccccctccgtgtcacgtgacccgggagcgtggccgtgcccgggtggcccacttggctcagcggcgccccgtagtccggcccgatgcgcatgcgcacagtcggagccccgctccggggccacccgaaagagccttgcctctactggccgcctccctcatagaccccgcctccccttgcctttcattggctcgcactgcagacctcacacccattttatgttttaaaaccaggaggccacgcccctcagcggcttcaggagcccagacctttgggggcccaccttccgcagctttccattggccccacggtggaagcccgtaggttcaggccctccgaacacagctcgctttccacaccagcggggccgtaccagagcaagaccatgtctcacaaaataataataatacttaaaaaatggtaaattttatgttatgtatattttccacactataaataaatatttgtgcatgtatatatatatatgtgtatattttttgtataataggtatagtagtaagcaaaggaaattcacactgagtcacattctacaaaatgcctaaccagacctctacaaaactgtcaaggtcatgaaaaacaaagactgaggcactgccacagactagaggagggaaaggagctgtgacaactaaattcaatatagtaccctggactggatccaggaatcaaaaaaaggacaaatttgtggataaagttggtgaaatccaaataaagtttggagttgagttagtagtaatgaaccagtgttaatctttttgtttcagtaaatgtattatggttatataagatgttagcattcagggaagctggataaagagtagacaaaaattatcttgctatctttgcagcttttctgtaaagctaaaaaagaaaaaaaaagtcttaataacaaggatacaattttccagagagagagaaagatgttgtaatagatgtaaattctttcttgggagacaaagctttaacatgctccaagactaattatctgaccaatctctccccagataaagaaagattgtcactaggcaaatgtccaaaaagcttctcagccgaaagctggattattcaacagtccctgaaacaaatatacacagaggacaagtgatttttttaaaaagggaaacaagcctggcatggtggtccatgtgtgtaatcccagcactttgggaggccaagacaggaggatcgcttgaggccaggaatttgagaccaaccggggccaaaaagtgagacccagtctctccaaaaaacaaacaaacaaacaaacttagccaggagaatcgcttgaacccgggaggtggaggttgcggtgagctgagatcacgccattgcactccagcctgggaaacagagcaagactctgtctaaaaaaaattttttttaaaagaaaaaaaattagctgagtatggtggcacgtgcttgttatcccttttgcttgggaggttgagaagggaggattgcttgaacccaagaggttgtgtctacagtgagctgtgatcgtgccactgcactccagctggggcaacagagcaagaccctgtctctaaaaaaaagggggtgggtgtggggcaggggaggaaacaaataccatgtatctaaattgatcgaaatttaaagagaagtgcaacaaattattgagttagagggatacagtaagggcctctcttaggacaagcagaaggactctctaaggaggtgacagttgagcagagagaccaggaggaagtgaggacatgggccccacaaggatctggagaaagagtaatccaggtagagaagatggcacatgcaaaggccctgaggtgttttattaatttcctttgatggccataacacattaccacaaattgggtggcttgaaacaacaggaattaattctcttacacttcgggaggccagaaattcagcatggaggcatcagtggggccatacactctctcgagatctttggggaggatccttaccttctccaacttcaagaggctccaggcattctttggcttatggctgcgtcactccaatttctccgtatatcttcagatggccttattccctgtgcctgcatctccttctgtatcttttttttttttttttttgagacggagtctcactctttcgcccaggctggagtgcagtggcgcaatctcggctcgctgtaacctccacctcctaggttcaggcaattctcctgcctcagcctcctgagtagctgggattacaggcacacaccacaacacccggctaaatttttttgtatttttagtagagatggggtttcaccatattcaccagagtggtctcgaactcctgacctcaggcaatccgcctgcctcagcctcccaaagtgctgggattacaggcatgagccatcgggcccggccctcctcctctacgtcttacaaggatacttgtcattgcatttagggaccaccctcatccaggataggctcatcttgagacccctcacttaactacttctgcaaaaacacattttccaagttaggtcacatttgcacgttctgaatgtacattttagggtctgtcattcaactcattacaaatgggatgggctttgcatgtgcagagaaagtcaggaaagccaggatagctagaaggaagagagcagaggaggcagggaggagacgctatcaaaggctggacaaaggccagacaggtatgattttacagactgcatgaggactgcaaattttattctaagtgaattggaaagccagagaggattttgaacaatatgcaaccacacacaatctgcacatgattattcataggtgctttagttgcaatagctgaaaactggaaaaaataacaaaaaacaacaaaaaaaatatcccttaagagaggaatggttaaacaaactgtgattcacccataccatgaaacactgctcagcaataaagagggcaaactactaaaacacgacaggccaggtgcagtggctcacgcttgtaatcccagcactttgggaggctgaggcgggtggatcacctgaggtcaggtgttcaagaccagccagaccaacatggtgaaaccccgctctactaaaaatataaaaaactagctgggcatggtggtgggtgcctgtaatcccagctactcaggaggctgaggcaggagaatcacttgaacccgggaggcagaggttgcagtgagctgagatcgtggcattgtactccagcctgggtaataaagcgagactccatctaaaaaaaaaatatatatatatatgtatgtagtcaggcatggtggcatgcagctgtagtcccagatactggaggctgaagcaggaagatctcttgagcccaggagtttgaggctgcagtgagccatgattgtgcaactgcactccagtctgggagacagagcaagaccctctgtcttgctaaaaacataaaatacaacaaaacagaaaagcaaagaagcacgcaacactttggatgaatctcaaaataagtagcctgattgaaagaagccaatcttggccgggcgtggggctcatgcctgtaatcccagcactttggaaggcggaggcgggtggatgacctgaggtcaggagttcgagaccaccctgaccaacatggtgaaaccccgtctctacaaaaaacataaaaaattagccaggtgtcgtggtgggcgcctataatcccagctactcaggaggctggggcaggaggatcacttgaacccaggagacagagtttgcagtgagccaagattgtgccattgcactccagcctgagcaacaagagcaaaactccgtctcaaaacaaaaagaaagaagccaatttcaaaggtaccattaatatgatccatttatatgatattctccaaaagtgacaaaaccatactatgggaggaaagatcagtgttgccaggggttagggaagggtgttagaataaagggggtagcatagaaggttttgggggtgatagaactgttttgtattatggtggctgcatgtgttaaaattctaattatgatagtggttacctatgttaaaatttttattgaactgaactctaaaaatttcaattttactgcatgatcctttaaaaactaaaattacgtacatataattttatacatatatgtgtaaataaatagataattatatgcacacacacaccgtccataaataaatagaattgtttaaagacacactggcaccaaaccaaagtgatcccttgaagtaaccagaagatttgaaagagaactggaaaagggactcaatttctgcctgtgcaattcaaaggtgtctttgatgttactcgcaggaaacgctgctgttaagtgtttcaagtctggggaagcaatgcgcttaccacaccctcatatccttgtcaatgcttatttttatgagtttcgaagtaagtatagagtctggaaatgtcacagagggaagcgatcatcaatgtcaagtcctctctttgatgacttgtgagacacagagcggggtgatctctgcaagtctcagcaagtggttcagtactaaactggttcccagatttcctgactcttcccggtgggcatgaaatccctgtgtttctaaacgctcctacagccttcgagaaggctcctaaggcacttagagctccttctaaactgatgcaggcccctaatcctggctttcatctccttgagccaaggacagcatcacgtaggcttccaaccgtcgtcatgaggtgtgagtcataccggcctccacacctgtaggaggtaatgcctaacagggagtgatggaaccggtatttccatccactcaagcaaataaatgaaaaccaacaagctctcaccactggggaaaattaaccatccacagaaaccacgaaaacattactaaaggagttgtcagtaatttataaatgaacagattcccaaaatttaaaaagaaaaatggagtcatcctacacaactttcaatgtgcttaacatgccccttaaaattgaaaatgaggctgggtgctcatgcctgtaatcccaacactttggcggagccaaggtgggaggatcacttaagagtttgagaccagcctgagcaacttagaaagattccgtttctacaaaaaaattttaaaattagccaggtgtggtggtgcgcacctgtagccccagctacttgggaggctgagatgttgcttgagcccaggagtttgaggctgtggtgaactatgatcacaccactgcactccagcctgggcaacacagcaagaccttttctcaaaaaaagaaatattgaggccaggcacaggggttcacgcctgtaatcccagcactttggaaacccgaggcaggcagatcacttgaagttaggagttcgacaccagcctgaccaacatggtgaaaccctgtctctaccaaaaatacaaaaattagccaggcctggtggcacacgcctgtaatcccagcaactcaagaggctggagcaggagattcgcttaaacctgggaggcagaggttgcaatgagctgagatcacgccactgcactccagcctgggcgacagagcaagtctctgtctcgaaaaaagaaaaattgaaattgaaatccaacatcctgggatgagctgacccacagaagctttttggtaatagccaaaaactgaaaaaaccaaaatactcctcgagaagtgaatggttaaatgtcctacggcacatccattccatggaatactactcagcaatgtaataagcatttattcgatattatactttatgtattataaaaagaaaggcaattatcattggcagagaagagagtcatcctccaaaatatggacctctttagtcatgcctaatggaacatagtataagaattattattcccttaataattattatttccttcctagagagaaagttatattagctaatcataaatacacagaatctagaaattgttctaaaactttatttttctcagtggggcgcagtggctcacgcctgtaatcccagcactttaggaggctgaggcgggtggatcgcctgaggtcaggagttcgagaccagcctggccaacatagtgaaaccccgtctctactaaaaaatacaaaaaattagctgactgtggtggcgggtgcctacaatcccagctactcaggaagctgaggcagcagaatcgcttgaacctgggaggcggaggtagcaatgagctgagattgtgccattgcactccacggcaacaagagtgaaactccgtctcaaaaacaaaacaaacaaacaaaaaaacctttatttttctcttgaggctcccatcagactacctgggaaggagatcttcgctcctgtctccctttcctttcctttctcttatccctcatttcctttgggtttggttttttttttttttttttagtactaactgcaggatcttggctcccagtgaattggctaagattgtgaagagtattgacagcttggggctgaatcctagttttgcctttcagttgcatttgatattagacacatttcttttcttttcttttttacttcccatgctgcactgatgtaacttttttttttttttttttttttttagtttctaatttttgtgagtacatagtaggtgtatatatttatggggaacacaagattttttttttgtatccattaaccatccccacttccgtcccaccccccaccacccttcccagcctctggtaaccatccttctactctctatctccaagagttcaattgttttaattttagctcccacaaataagtgagaatatgccagttccatctaaattgttgcaaatgacaggatctcatttttttatggctaaatagtactccattgggtataataagtaccccaaagtccactatgtcatactttttttttttttggaggtggagtttcactcttgtcacccaggctggagtgcaatggcacgatcttggctcactacaacatctgccttctgggttcaagtaattaccctgcctcagcctcctgagtagctgggattacaggcgcccacaaccatgtctggctagtttttgtatttttagtagagacagggtttcgccatgttggccaggctcgtcttgaactcctgacctcaggcgatccacccacctcggcctcccaaagggctgggattacaggcatgagccaccacactcagcccatcgtgccctttaaaggaaatgtatatgttcctttgagcctttaagtttctcctatagcctgggataaaaatgtatggttgggctgggcgcagtggctcacacctgtaatcccagcactttgggaggccgaggtgagtggatcacttgaggccaggagttcaagatcagcctggcgaacatggagaaaccctatctctgctaaaaatacaaaaattagccagtcatggtggcgtgcgcctgtagtcccagctactcaggagactgaggcacgagaatcacttgaacctgggaggcggaggttaaagtgagctgagatcatgccactgcactccagcctgagcgacacagcaagacccttgtctcaaaaaaaagtatgattggagctaaagaagcaactttggactcagacatggaagctatgatttaaggaaagcactttaccagccctaaactacccacctccagacctgtacatgagcaagatataacttctatccaggttaaactactctattttaggttctcgttgttacagcagctcatactgtacaataatttaaaagttagcaccaagagtggggttttgccctaataagtaccagatgtggggttttgccctactaagaaccagaactggggttctgctgtagtaaaaacctgaactgtaaggcattaacttgaccatcagacagcaggtcatgaagacacagatacaaggtgaggatctggtgatctatgttacattatggcagaccactaggtaaaactgtgatgtcttgaatgacagagcaggcaccgatggagtctccaagctttggagatgtcattggaagaacccagactatttgtgtgtgtgtgtgtgtgtgtgtgtgtgtgtgtgtgtgtgtgtgtgtgttgactacttctggctactattaataaagagagagatatgtactgtagaagtggagatggaaaggaatagaattgtatcagtgaggccgggtgtggtgcctcacgcctgtaatcccagcactttgggacgccaaggtgggcggattgcctgagctcaggagttcgagaccagcctaggaaacactgtgaaacactgtctctactaaaatacaaaaaattagccaggcatggcagtgggcgcctgtagtgccagctactcaggaggctgaggcaggagaatcgcttgaacctgggaggcggaagttgcagtgagctgagatcgcgccactgcactccagcctgagcgagagagcgagactctgtctccaaaaaaaaaaaaaaaaaaaaaagaattatatcaagggaggctctttctccatgcaggctacagttgaaatgaactgacggtggtgattcagggcctcacagggcttcaaagcaaaacacctcctgcacccataaaatgaagcatccatgcaagatggctctgatgaggcaacgggttctcagcagcttcccacttggaagtctcttctagactgtgagagtcagcccaggagcaagagtactgcctcccctctcaactctgcctttcaaaaagctaagagtagctgtcactaacatgagagaatatccccgggcgcggtggctcatgcctgtaatcccagcactttgggaggccgaagcgggcggatcacgaggtcaggagatcgagaccatcctggccaacatgttgaaaccccgtctctactaaaaatacaaaaattagctgggtgtggtggcacgtgcctgtaatcctagctactcgggaggctgaggcaagagaatggcttgaacctgggtggtgaaggttgcggtgagccgagatcatgccattgcactccagcctgggcaacaaaagcgaaactccatctcaaaaaaaaaaaaaaaaaaagaaagaaagaaaataaaaaaagataagagagtaccaaggtccaggcatagaggctaggaaataaaggaggacagagttaaggtttaagaactatgccagagaagatattgataattggctctcgctccttgcatatgggcctgcctggagacaagaggatggaaagtctactaaatttttgagatctgcattgtcaaagaaactatataagtctggactgctttggcacagtcttttgactgtgattatttgacattaaaaagaaaatcttggtggggagcaatggctcatgcctgtaatcctagcactttgggaggctgaggcgggtggattacttgagatcaggagttcaagaccagcctggccgagtagtgaaaacccatctctgctaaaaatacaaaaactagcctggcgtgatggcgcatgcctataatcccagctacttgggaggctgaggcaggagaatcacttgaacccggaaggcagagattgcggtgagccacgattgtgcccctgcactccagcctgggttacagatggagactccatctcagaaaaataaaataaaataaaataaaataaaataaaaaaatcttggccaggagcaatggctcatgcctgtaatcccagcactttgggaagccaaggcaggggaatcaattgagcccaggagtttgagaactggcctaggcaaaaaagtgagacccaatctctgcaaaaaattaaaaaaattagccgagcatggggttgcatgcctgtggtcccagatacatgggaggcagaggtaggaggatcccttgagcccacaaggttgaggctgcagtgagccatattcacatcactgcagtccagcctaagtgacagagaaagaccctgtctcaaaaaaaaatctgtatcatgaaccccctcaaaattgtaccagcaagaaacgagaaaacttcagaaatggctttggggcatagaagacaatgaagggccccactagcgggcaaaaccaaggaccatggaggacaatggacaaacaacttactctctggcaaggctgcccttcaaggagtcttcacaatttctgcctgataaaatttgcatttgttttgttttgttttttacagactgggtctttctctgtcgcccaggctggagtacagtggcacgatcatagctcactgcagtctcaatctcctgggcccaagcaatcctcccatctcagccttctgagtagctgggaccacaggcacatgccaccacacccagataatgttttgtttttttgtagagatggggtctcactatgttgcccaggctggtctcaaactcgtggcctcaagcaatcctccaacctcggtttcccagagtgctgggattacaagcatgaaccactgcacacctagttaatttctgcataatgaaaatttcatattgcggttcattgacttttgtgtgtttcccacgcttccattgaagtggaggttttttattgtttgggaaattgggggcagaggtgtttgtttgtttgtttgtttgtttgtttgactatggttttaccacttatactgcatgtagactagagggagctttttaagtttgtaggccaccagaccatgagaaaccataccagagctcaatggaggaatgttatatttcaaaccagaccagcgagtggatgagtcattaggctatgtctcttggatagggatggtctgtgtatgagaagaaggaggtgcatgtacactgtatgcagtggcaccagttcatctagctctgcctgtttagggaggtgatttagatatttcagaaccaagatatctacaagacaaataaactcttctcttgccaactcaatgttgctaactggctgcatttcattgcatatctcttttaacttaatttctatttttaattgtggcaaaatacacacaacataaacactaccagtagagtcatttttaagtctacagctcaatggcattacgtacattcacactgttgtgtaaccatgaccaccactcattatcaggacttttccatcttgcaaaagtgaaactccatacccattaaacactcactctccattctcatctcccttaggccatgacagctagtgttctactttctgtctctatgaatttgaatgctctgggtacctcacagaagttgaattatctgggtacctcatagaagtagaattatacagtacttcttattttgttattggcttatctcacttagcatactatcctccaggctcatccatgttgtgtcagaatttccttcttcttaagaatgaataatattctgttgtatggtggtatgtgctataccatgttttgtttattcatccatccactgaagggcacttgtgttgcttccaacttttttggctattgtgaataatgttgctctgaatatgggtgtgcaaatatctcttcaagatcttgctttcaggctttttggattacacccagaagtagaattgctagatcatatgctgaatctatttttaactttttgaggaaccacctgtattagtctgttctcacactattaataaagatatacctgagactgggaagaaaaagagcattaattggacttacagttccaatggcttggggaggtctcagaatcacgacaggaggcaaaaggcacttcttacatggcagcggcaagagaaaatgaggaagacacaaaagtagaaacccctgataaaaccccgtttttactaaaaatacaaaaattatctaggtgtggtggcacacacctgtaatcccagctactcgggaggctgaggcaggagaatcacttgaaccaggaggtggcggttgcagtgagctgagattgcggcactgcactctagcatgagtgacagagtgagactccattaaaaaaaaaaaacccacacaggtttagaatctcaaagtgtctatagatcaggaatcttagttggggcacagctactcacaggctgcaatcaaaaggttggccagagctgcggtcttatctgaaggcacaagtgagtaaggaccctttttctagtttatttatgtggttttagcatgaattcagttacttgaaaactgttggactaagggccactgttgctcactggatgttggctgtaggctacactcagtttcttgcctctccaaataggctgttggcttcatcaaagccagcaagagagagattttgctgccaagaaggatgccaggatctttgtaacacaatcatggaaatggcatccactcaacattttgatattctattggtcagaagcaagttactcaagaggaggaaattatatgaggtcatgagtaccaggaggtgggatcactgggagccatcttagaggttccctgccatactgtctcctcttctgtattttagggctccagtgcctgaccacttgcttccccaacttctagcaacaccttctccccttctagtactagaaaggcattctcctcccatcatatccttatagtaagctttaccctctcttgccatgtgaccatgatgacagaatcatttcagcggaacgtgatttatgggaaagtggcaaggatttcaacaaacacatctgtttaggctgggtgcagtggcacacccctgtaatcccagtgctttgggaggccaaggcaggagaattacttgagcccaagagttccagatcagcctgggcaacatagtgagatgccatctcttttttaaaaaaaattatccaggtgttgtgttgtgtgcctgtagtcccaactaactacccaggaagctgaagcaggaggagtccttcaacccagaagtttgaagctgcagcaagctatgaatgcaccactgtactccagcctgggtgacagagtgagacgctgtctcttaaaaaaaaaaaaaatctgtttagaattttcaaaatagtatccttgtgagtcatataatcatgtatatgtttaaatacacagaatgagcagcagaaatggaaaacagagatgcaaggagaagcattgaaaaggcaaggcacagatgtctacatgaaaagttagagttatatgagataatgactcagtttccccagcatgatcagaagagtattgatggggagagtttcccttaggcctggcctattttattcttaggcaattctacttgtaagtgtatcaactggattcaacaggaaatggaagacacattgcttctgggtaatttaggggaagtttttcaaagggtctgtttgtaatgatgtgggcaaagttaagggctggtgtggcatcccagagctagcaacactggggagctgttaacacttattaatgcctgatggtgcaaggaagagaatgcttacagatgaccagaaaaagtggctgtgtggaagggcctatggcccctaataaagagagcagccaactacagcaaccaagcatctggtatctctatagtctccctgacatttctttccttctgacctccatctcctgacaatgcctccaattggccaaacccaaccagaaaccagagggtgccaagcccatcagtgtggtccatataggttggtctcccgagacaacaagcaaagtagacattttgggacaaatagaaaacacagcacataaagcacagcccatatcatattttcttggagaattttatggtgtcagcttcatcacctgtgttcagcaaacttcccttttcctaattccacaaagtataaaggtaggttattgatttaggatctttcttctttttcaatgtaagcattcgcagctatgaattgccctctgagccctgcttttgctgcatcctataagttttagtgtgttttgttttcattttcattcatctcaatgtactttccaatctaacataatttcttctttgacctcctggttaagagcatgttgcttaatgtctgcatacttgtaaagttttcttctgtcactgatttcttactttattccattgtagtcaaagatactttggattatttcaatccaacaccagcatctaattaaacaaaagttaattactaaagcacagtgagacaccactttacatctattaggattgatatgatttttaaaaacacaaaataggccaggcacggtggttcacgcctataatcccagcactttgggaggccaagatggccagatcatgaggtcaggagttcgagatgatcctggccaacacagtgaaaccccgtctctactaaaaatacaaaaattagccgggcatggtggcacgtgcctgtagtcttgctactcaggaggctgaggcaggagaatcatttgaggtggaccctgcagtgagccaagattgcaccactgcactccagcctgggcaacaaagcgacactctgtctcaaagaaaaaaaacattaaaaaaaacctacttcttagtgtgacaaaataaaagaatgctgaggacggtgtcagtccagatcaatgctactagacacaaccttccacagcccaccctcaaggggctgccttaatggcatcctccactggtgcacatcagacactgcagaccaccgtgcatcgcagccaagtccaggaaatgaagacgaaagaaaaagcatccattcctgagcttatgccaagtctcaggcactattagttgacaaagcctatctcatttaaggcatgggagtgaaccctgtttaccagatgggacaactgagtctgtggaggtacacatgctaataaaaaccctagagtggctgggctcagtggctcacatctgtaatcccagcatttagggaagccaagacaggaggcttacttggggccaagagtctgagatcagcctgggcaacagagtgagaccctatctgtacaaaatcagaattttaaaaattaattgggcacggtggtgaacacctgtagtcccagccatgtgggaggctgaggagggaggatcacttaagcccaggagttggaggctgcagtcagtcatcattgcaccactgcactccagccttggcaacagagcaagaccctgtctccgaaaggaaaaaaaaaaacaaaaaactaaaatagcctgaaacgtagagcaggtttttgtttgtttgtttgtttctgttttgttttgagatggagtttcgctcttgtctcccaggctggagtgcaatggggtgatctcggctcactgcaacctccacctcctgagttcaagcaattctcctgcctcagcctccgcagtagctggaattgcaggcctgcatcatcacgcccggctaatttttgtatttttatcagagacggtgtttcaccacatttgccaggttggtctccaactcctgacctcaggtaatctgcccgccttggcctcccaaagtgctgggattacaggtgtgagccaccgtgcccagccaagcagattcttatttaaaaaccccacggctccacgccagggtcctcctcagagccactctcacctccttgttccacagagtgcacaccacagggttcagcagtggcatcaccaccgtgtagaacacagccaccaagcggtcctggtcggggttggccccggactccggacgcaagtagatgatggaggcgcagtcaaaatgtactacgaccacggtgacgtgggccacacaggtggagaaggccttgcgccggccggctgccaaggaaatcctcacgatggcagccacgatgaaggcataggagaagaggatcgggacgaaggacatcagcaccaccaggacgctcaggaaaaagatgcccagcgccttgctggcactcttggcgcagctgagcttcagcaccggggcgatgtcacagaagaagtgctccacgtggtctccgccgcaaaagggcgatgagaagatcatgctggtctcgatcaaggccaccgagaacccagagcagaaaaccagggctcccaggcagaggcaaacggtgggtctcatgaccatagagtagcgcagggggtggcagatggccacatagcggtcataacccatcagggtaaggaggaagcagtggctgcatcccagacccaggaagaaaaacatctgagcctgacagccagggatggagatggcctggtctccatcagcagatgagccagcatgctggggatggtgaccagcgtgtatagcaggtctccgagagggacagcaccaccaggaagtggtacatgggagtgtggcgggacctatccgcatgggtgatggtgatgatggtgacgttgccaccgagggtgaccaggtaggtaaggaagaacagggtgaagagtgtgttcctcaggtgtgggaggttggagaatcccatcatcaggaattctgtcaccagacaggtcccattttcctgctgcttgtaaagagacagagaggaggcaacagaataggtaaaatagagtgattaataagggtctgcgatgcatcaggtagcagtgtggaaagaaaatcatttctggccaggcacggtggcacacgcctgtaatcccagcactttgggaggccaaggcgggtggatcacccgaggtcaggagttcgagaccagcctggccaacatggcggaaccccgtctctactaaaaatacaaaaaatgtagctgggcgtattggtatgcatctgtaatcccagctacttgggaggttgaggcgggagaatcactcgaacccaggaggcggaggttgtagtgagctgagatcacgccactgcactccagcctgggggactgagtgaaactccatctcagaaaaataataataataattcctgttttgcaaaaactgaaaggggtactcagaaacaataagccctttgttttcctaagagtcacacaactagcaagtgactcttccacagataagaaaatcagaggaatgtatgagaaaatgatatttggtgtgtggaaggaagatggtaagtttgaatttctctagaaacagatgcttgataagaattcaagagaaatattttatataaaagatgatttcaagtgacatacatagggaagtaggacgtgaaacaaggaaggtagataaccaatacaatgtacatcaccaaggaaggtactgccgtgggccactggaatttaatcttatgtgcagaaccgtgggacgtgtccaggaatatacacttctatgtttttttacccaaggtatgagggagcttggggatatatccactcagtcccattagccactgattgaagatttctctcaggaggcattaaagtgccagcacatgccgcttgccatgtgtacagaaaattcaaagtctggctcagcaagaaaaataggagcaacggggatgtaggtgagaattttacagggtctgctatagtccatgtgaaaaagaatatctggccagacacagtggctcacgcttgtaatcccaacactttgggaagccaaggcaggtggatcacttgaggccagaagttcgagaccagcccaaccaacatggtaaaaccctgtctctactaaaaatacaaaaattagccaggtgtggttgtgtgcacctgtaatcccagctactcagcaggcggaggcaagagtattgcttaaacccaggaggtggaggttgcagtgagccaggatcatgccactacactccagcttggacgacaaagcaagactctgtctcaaaaaaaccaaaaaccttaggaaggcaaaggcaaagactgcaaaattgatacctgaaataaaccaaataacactttcaggagaatgaggtcagcaagattgtggaatagaagttttctgcctttacttccttcagctactggaaattgctggcaactgttcaaagtgaagaatgctatcattaatatcaagaccttaggagtgaggctgagatgcccccttggactgaagaataaaaaaaaaaaattcatggtgaaacagtaagaggaatggttctctctgactacactgtccctccctgaggccagcaggacaccatatgctgagagttctcctggacccatggtttttgcagtggaagggatgagttggaagtgaacattcagcttctccatcattctgggattcttcacgggtagcttgctcctatctcgtcccacttgaaatgttgagaatgccggcatggctggacaccaggggtcagttcggtcaaagaacagcggacgaggggctcacaggaaccagttcacaagttttggtacttgcgctgcatccccaccagcagaagtgccgatatggttaggatatttgtccccacccaaatctcatgttgaattataatccctaatgttggaggtggggcttagtgggaggtgtttgggtcatggaggcagattcctcatggcttggtgctgtcctcacaatagtgagtgagttcttgcaagatctggtcatttaaaagtgtggagctattccaccccactctctctctcttgctcctgcttttgttatgggaattgcctgctcccattttgcctttcatcatgagtaatgcttcctgaggcctcctcagaagcaaagcagatgacaccatgaagcatgctggcaccatgcttcctgtacagcctgcagcactcttagccaattaaacctcttttcctcatgaattactcagtctcaggtatttctttatagcaatgccaagaatggcttgctacacttgccacaccatagaaactagcaaacagcatcatgtgcaagaaacatggtgcatgttatttttcctaacaacattaccacccagccagggaaaacaacatccaaccatgcctgatcagagacaattgcagagcccagccagccgccccacatgatggcagagtccagccaggtgcccttaccagactgtggaacacattcagaaataccactcaacctcagagaacaggaagcaactcagcccagttagagaaccccacagcaaagtctgcctgtctggagtttcaaccagccagcccacccagaattccaaactaaactaaataataaaggtctatcacaaccaaattccacctgcaaaggctggaaaggatggctgtctcctcaaatgtaaaagcaactacgtaggacacaggtttatgttttaaaaaacaaacaaaaaaataaaaaaacaaggaaacataacactactagaaaaaaataataaagctccagtaacagacccagaagaaaaggtaatctataaaatgactgaaaatgaattcacaatgattctctaaaagttcaggagcctaaaagaaaatacagatagaaaattaaatgaaatttgaaaaaactttataaacaaaattagaagtttggcaaagaagtagaaacaattaaaagcacaaatagaaatcctaggaagaaaaaaacataataacctaaataaaaagtttgatacaaagtaggattaagagtgtagagatactttatttctgtgatcaaagttaagtggttatcatcttaaaataatcttttaacactataagatgtattttgcaagcctcatggcaagcacaaagcaaaggcctataatagatacacaacaatgaaaaggaaggagtcagtgttcgctttggcagcacatatactagaaatggaatgatacagggatgatcgtggcccctgcacaaagatgacatgcgcattcttgaagcatcccaacataaaacttattttaaaaggaataaatcaaaacatatcactagaagaaagcatttaagcactaagaaaaaaaagtaaatgaggaagaaacaaaaagaatacataaaataactagaaaataatcagcaaaatggcaatagtaagtcctcacctgtcaacaattaccttgaatggacacgaattacattctccatcaaaaaacatggggtgaaggaatagatagaaagaggcacccaatcatgtgctgcctaaaagagacttaattcacctgtaagaaacacagaatgaaagagatggcatggaaaaagatattctagggctgggcatggtggcttacacctgtaatccaatgctttgggaggccaaggtgagcagatcacttgaggtaggcattcgagaccagcctggccaacatggtggaaccccacctctactaaaagtacaaaaattagccagacgtggtggtgtgtgcctgtaatcccagctactaaggaggctgaggcaggagaatcacttgaacccagaggcggaggttgcagtgagttgagatcgcgccaccgcactccagcctgggcaacaaagcaagactccatctcaaaaaaaaaaaaagaaaaagaaaagaaagaaaaatataatccactcaaagggaagccaaaaaaagagcagggattacaatccttatgtcaggaaaagaaaataaactttaaataaaaaactataaagaaacaaagaaaaacattatataatgataaaggaatcaattcagtacaggatacaacaattttaaatatatatgcaaccaacaatggaaaacataaatgtataaaacacatattccctgagggattcatgccatgaaaaagtacaaggccttacttcaaatcttcagaaactgaagtaaaatgaaaccccaagccaagaaactcagactctacttaagaaatccagatctaggcccggcacgatggctcatgcctgtaaccccagcactttggaaggccaagcaggcagatcacaaggtcaggagtttgaggccagcctggccaatatggtgaaaccccatctctactaaaaatagccgggtgtggtggcacacgcctgtagttccagctactcgggaagctgagacagaagaattacttgaacccaggaggcaaaggttgcagtgagctgagatcaagccattgcacttcagcctgggcaacagagcaagactccatctcaaaagaaaagaaaagaaaatccagatctaataaaaagcatactggcagacatgccctaaatatgtctgaaacaggcctttttatggtgaagtaaacaacatcaaagggaagaacagaaccctttatagagaccgtgatagaaactcaataacatggaagacttcacagtgaaaaaataatgagatatgactatttaagaagtataattacttaacatgacaaaacattgttaaattgaaacaaatttataggcaaatcacgaactagaacaaagctgtgataaatgtttacctcttacaaattaagaaaaatgtgagccaggcacagtgactcatgcctgcaatcccaacacttttgagaggccaagacaggcagatctcttgagcccaagagtttgagaccagcctgagcaacatggtgaaacttcatctctacaaaaaaaaaaaaaaaaaaaaaaaaaatatatatatatatatatgtatatatgtatatatatattagccagccataatagcatgtgcttgtagtcccagctactctggaggctgagaagggaggatcacttgagaccaggagatcaaaactacagtaagccatgattgcaccactgcactccagcctaggtgaacagagagcgaccctgagaaagaaagaagaaagaaaaagagagaaaggaaggaaggaaggaaggaaagatgggagggagggagggaaagaaaggaagaaagggaaagaaaggaagaaagagaaagaaaggaagaaaaagaaaggaagaaagagacagaaagaaagaaagacaaaggaaggaagggaagggaagggaaaatgtataggaccactccccaacattcatggagctcaaataaagacccatataccatgtgactgattatttaaagttaaaagtgaagctaataaacagttaagtaaaatatgctctaactcatcacactgacagccttcataatgacatgaaaaaacagaattcaatttaggatttctggactctttagagttccactccagaatgtgatgctgtggagagcaccgtgtgctagtttctagcccatgtcctatccccttctcttcccaccccaggtgccacttagcactgcgaggggccttgtatgtatgtgtacagatatcccaaccatgcaccttcaagatgcagcaacaccctccttaactacaccactgcttaaccacacctaaggaaatacacgccagcagtgtggttcatatcagaagaaagaagtcctacttttggccctgctagtggcttggagccacctgggcagggaattctagggtcatgtagcgcatcatctacaatgaggtgcaagctcaaggtaaagacatactcttgactttgtaaactcttcaccccttgggatggggtagagtcgagtcctcagatgcatcagtgccagggcagaatccctcttgcccaaggctaacagtagtcctctaacaccccagtataaaatcagcagatgaccctgatttcattatgatataatgtatacatggattgaaacatcaaactgtactccataaatacatagaattattatgtgtctgtctagataatttcacctctagatttttctcattgaaaaataactgcacttagatatataggaatgttcataactgcattatttaaatttttaaagaggacatgacctaaagtgttctatagtcgaaatgcccttacaaacaagggtaaaacaaaatactgacattctaattgaaaaagatacaaagcacaaaaataataagacattattaaagtcgtatctttgagaatggataataacatgggaagaattctcatatatgggttgtgtgagagtgggatacgaaacagtaaaaattctgtgatgacattcgcatacattctttatacttttttgaatttcccaaatattctacatcaattgctaatttgtatcaatagaaaaataacatttcttagaggatattttttctcttgataaacccttttcctgtttaatcaatctagtttgacagaggaagccaagggttgagataaacaatgcaaaacatgctaaagccatttgtaactaaagtgttttgttttgttttgtttgaaatcgagtctcactctgtcgcccaggctggactggagtgcagtggcacaatctcacctcactgaaacctctgcctcccggattcaaatgattctcctgcctcagcctcccgagtaggtaggattacaggcatctacctgccatcaagcctggctgtcatttgtaattaaagttttaagaaataatctgaagagcaagtgactgtggaagagaccctttaaggtattatcacaggctcccttcaggtataagtcagcaccctcttgggcatcacatggaagggaattggaaaggaaaccccccttgatatttgctcagtgtaggagtgtcctctaccacaattatcctgcctccacttgcttgcctccagtgatgagaagatcactagctgcaaaaaaatgcccattacctagagcagaaatttcatgctcaaggacagcccctcagtgaccagcagcaataccaagtagagctctgtaatatcacaagcctagatttgaatgctggtgccttaccaggaacagggtgaccttggtcagctaattttgctcctctgagcttcatctatgaaagtggagattgatcttctgaagtcacgggtaataggaagatgccctgacagtgttaggaatcttttggtctctaactacatttttttttttttttagactgagtctcgctctgtcacccaggctggagttcagtggtgcagtctcagctcactgcaacctctgcctctgggttcaagcaattctcctgcctcagcctcccaagtaactgggattacaggcatccaccatcacgcccggctaagttttcgtatttttagtacagacggggtttcaccatgttggccatgggccaggctggtctcgaactcctgacctcaggtgatctgcctgccttggcctccaaaagtgctgggattacagacatgagccaccacactcagccggtctctaacttcttatgaggacgcctgggattcttattctctgctctgcactgcttgagaggcagagtatagcaggtttaatttgctcacattctcagtcctggcatcaggattggaacccaggagtctgtctctggaggctgtgctttcaggagtgtgagtttcagcgactcacctttcattacacacatcttcatgaacagctcctctgtgacaggtgcttctgagggcatgaggacacagcagggaactaaatgggcagagatacctgccctggaggagcagaaggtactaagggaggcagccgcgcaatcagccacaaacaggataactcaacaagtgagttacatcagagctaagtgctagaaacagaaaagaggacctaaagggagaattgagaaatcaggggagagttgccattgttaatgggatggtcagaaaagtccttgttgatgtttaatcacggtcagctcagaatttctccttcctcgactgccccaattttctgatctcagctctaggctagagatggatcagcgtggcttctccagccaggcaaagaccccgaattcacaattgaaaaagaatgagggaatgagtcaagacggaggagagcattccaatttctccttccttgactgccccaattttctgatctcagctctaggctagagatggatcagcgtggcttctccagccaggcaaagaccccaaattcacaattgaaaaagaatgagggaatgagtcaagacggaggagagcattccaggtagaggcaacaccctgtggctgcaccatgcctggtacaggagcagcaaggaggaatagtgagggagagacagtgagggagagggagcaggtaagcacagggaggggacagagggatgttgtgtaggccttgtagatcaaggggaggacttggcatttactcctaatgaggtgggactatggaggggtctaagcagaagagggacatccccaggctcaggtgttcccagacgccctctggtggctatgggaaaactgtgcgtgaggcattggacacagcaggttaagaggtgactaggctggtccaggccgatgataatgggatcagtgtggaccacgtgggccattggaagtgggcttgccatggtgggcacatggaggtggtgaggacttgcccatctggatgggttgtgaaggtgaagcccaatgaattttttgatgggttagaagtgagtttagagacaggccgggcatggtgactcatgcctgtaatcccagcactttgggaggccaaggcaggcagatcacttgagatcaggtgttcaagaccagcctggccaacatggtgaaaccctgtctctactaaaaatacaaaaattagctgggtgtggtggcacatgcctgtaatcccagctacttgggaggctaaggcaggagaatcgcttcaacccgggaggcggaggttgcggtgagctgagattatggcactacactccaacctgggcaagagagtgagactccatctcaaaaaaattaaataaataaacaaataagtcaggtgcagtggtgtgctcctgtggtccccgctactttggaggctgaggtggaagaactgcttgagcctaggaggttgaggctgcagtgagctgtgatcatgccactacactccagcctgggcaacacagcgagatcttgtctcaaaagaaaaaaaaaaaaccttaaccatttccattcattcatgtattcattgaacaaatatttaaatatttttaattaaaaattttttttggctgggcatagtgactcacgcctgtaatcccagcactttgggaagccaaggtgggtggatcacctgaggtcaggagttcaagaccagcctgtccatcatagtggaacctcgtctctaccaaaaatacaaaaattagccgggtgtggtggcacacacctgtaatcccagctacttgggaggctgaagcaggagaatcacttgaacccaggaggcggagtttgtagtgagctgagatcgcaccattgcactccagcctgggcaacaagcgtgagactctgtctcaaaaaaaaaaaaaatttattgttttaaaaacagaaataggctcaaagaaagagctggtggaggagctggcagagtcacactgggggataggggcagggccagcccagctggagttcagcgaggactctgtccatctcaggattgctgggggtggggacccacagtgtctagagctctcaaaccgacaacctggcccctctccgctctcatcttggaggtggcgtctgccccaaccccctgcacccaccccagacagaaggaagaagaaaggaggaaatcccaaatgtggctgaacattaactctgcaacagctgaggagctgtgactgagtttgctgcaatgtgtccagattccaggcctgacccaaaaagaggtcaattcacaggagtagaatattccttatttgcctacctggaacccatgaaaattgcacccattgagagcgcccaggctggttgcttgcttagtgagagagttacagggaaccagttggtgctgagttcaaggaccaagccaatgccacctccacagtgcaggggagaggggaccaggtgacactcctgagagctgtctggagccgggaagctgaggaatgcatgggactggggtctggagtctttccttttcctctttcttctcatcaggaagacccccaaaggcccttctccgcccctttcagccccaccctaaatgactctgtgtgtgtgtgtgtgcgcgcgcactcatgagactctagggcacatgcgtgtccacaccccatatcttccctgtctgcttgcacacctgttcacaccatgatgcagtgtctgcatgtgtgtgacttttcaagggtctcttttggttcccccagatgcgcctccttgcctttctgggaaaatcttatattcttctccagcccatgctttgtagttggcaaaaaacagatcgaacacctttctgggaaactccattcaagtgtgtcactgcttagccttttctgggttagcatagtccctctacagtttctctctctccccacttatttgtagatctgaaccttaaggccagggatgggccggggtggctccttcagccaggaaaagcctctgaattcacactcaccattgccaagggaggctcctgcagtgcctgctggcatcgctctgttcaccacctaaaaagggaggggctgaggacacagctcctgttatgctgagggtccccagagctgccatcccacaggccccctgaacactaagaagtcccacggagctcaggcaggtggcaccctgaggggattttccctccaggaaactcaagacccctgggtcagcttcctaagcccacagaccctgcatgcacagagcgggaaaaggactaattactatttctttttgtggataacaagcagaaattcattaatgaatggcagagcattcattcatgctcctagtacccacctgcgctaggcaaggctgcttcctgaggaaatgcacccccaggccctgccctcaagagagggaggaaggagtggatcatttgatgttgttctaccaatgttgcccaggtttaacatctcttggtgacctcagccttctccatccctccttccctagaccattaattaccaaatcagcattcttcctcccaaaattctctctatcccctcacctccaccccaactcaggactgcattattcttacctgttgcaagaacctgcagtgtcaactccctccagtctgacctctgcactgaccccaggacagaaaactcaagctgtgctcctcctctacgcaagcaccttccatggctccccattgctttcaaagtttaaaatccctccatcttcacatccaagactgttgtgatatgacccctgccacctcctctactactaaatacagccattgctccactcataacaacactcactcctacttttactaaaaacacaccaccagcatcaccttctccaggaagccttctgtaagaacccccaagctagtcatatgcagtatctgggctaccagaagtcctgggttgtctcttcatattgtctgtgttcctctgtgtctcctgttagcctgtgagctgtcggacctggcctcatcttattcctttctccaggagcattaaacttagatgataaatctgttccttgcaatgctcctttctctttcttttcatggtatatgctttttctctggccactcttccttagtctcctcctcttctgacccctaatatgataattccccagggctcagtcctagaccttcttatctctccctagctgatgaatatagactcatgattctgtgtacccaatctatgccaaaaagcctgcatagtttgggtttcccccagacacagactctgagacaaggattccagtggaagtaagtttatttgggaggtgataccagatctgaagaagtgaaagtaggaacaaaaggaagtttataaagcatgtcctatcaagtaacttatccctgtaagcaactggggtcaatcccactggagacctctgggtggcagcatagaacattcactgcagaggggtaagggagctgaggtatgtatacacccactccagttggttattgttgagggttgctcctgagtgcattaattatccaatactcctgtcctgctgtacatgtggatggagtaagctttaatgtccagagaaagccctcagacaaatagatgcaagcaccgagtgttggaaatcaggccaatatgcagtgaagttgtcagagaaagtggatgcgggcaggggactgacaccatctgctgcatgtggtttgtccacttcatttctgaccattctttgtcactctctttctttacttttactgttctgatattgaagtagctcacggcttcaaccttgactctcttctctctaactgattagtacaatcatatggttttaaataccacttccttaccagtattccccaaatctacatcttagatcagccaaccactctgagctccagatgcataatccaacaatcaatcatcaaccaatgtgaggtggaatgtcagaaaaaatgtcagagtaaggacctccataaattatgtcctccataaagaatgaaaaagctagaaaaaattgttagactaaatttttgggaattctagaaattaactaaagtcttgcagcaactcagagaaaatgtattcagaaaattactgaatatcagtgagaacagcatactcggcattttaacatctctggtcttctcccccactctccagctccgtggtcgtcttgaaaaataccagcccaaactctggtgcagcctggcatccaccagagagagcaaaacagaactagagcactttcaagcctcattcccaaagaattgtcattattttttaaattttatttatttatttatttatttattgagatggagtctctctctctctgtcgcccaggctggagtgcggtggtgcaatctcagctcactgcaacctccgcctcccaggttcaagcaattctcctgcctcagcctcccaagtagctggaattacaggcatgcaccaccacgcctggctaatttttgtatttttagtagagacagcgttttaccatgttggccaagctggtctcaaactcccgacctcaaatgatctgcccacctcggcctcccgaagtgctgggattacaggtgtgagccaccacacccggccaagaattgtcattatttaccaagctaatggttccctgcaagatcccactggcaaagctctctgtatttgacctggctctgagataaaccatgcaaaaagccttcactctgggggtcctttgttgacaacagctacaggaaggtattttagcttcatggatgcctgaggcagtgagtgacagttgagacaaatagactaaaccaaaagctagggaaggagctgtctatagaggctttgaaaggctcagataaggctgggtgcagtggcttatgcctgtaatcccggcacattggcaggccaaggagggtggatcacgaggtcagtagttcaagaccagcctgccaacatggtgaccctgtctctacttaaaaatacaaaaattaggccaggctcagtggctcatgcctgtaatcccagcactttgggaggctaaggcaggcagatcacctgaggtcgggagttcgagaccaggctgaccaacatgaagaaaccccatctctactaaaaatacaaaaattagccaggcgtagtggtgcatgcctgtaatcccagctactcaggaggttaaggcaggagaattgcttgaacccaggaagcggaggttgcagtgagccaagatcacgccattgcattccagcctgggcaacaagagtgaaactccatctcaaaaaaaaaaaaaaaaaaaaagagaagaggccgggcacagtggctcacgcctgtaatcccagcactttgggaggccaaggcgggcggatcacgaggtcaggagatcgagaccatcctggctaacatggtgaaaccccatctctactaaaaatacaaaaaattagccaggcgcggtggtggacgcctgtagtcccagccacttgggaggctgaggcaggagaatggcatgaacccgggaggcagagtttgcagtgagccgagatctcgccactccactccagcctgggaaatagagcaaaactccgtctcaaaaaaaaaagaagaagaaagattggtagatggatggagagaaagatatataaatgatagatgatagaaaaatagaaagattcatagatataaatagacaacagaggacagagaagcataagatagatatagacggatgaaagataaacgatagatgatagacatagatagataataaataaatgattgacattctagacagatgaggcatgcgcagaatgtaggcaaggaatgttactataccttggggctcacaatggtggagagcctttatcgcttctatgccaaaagggccaagcagaggaaacaataacccagacccacagagggtaggtagctggagggagagcactgcaggtaccctgcaggcagggagccagggagacaaatacattccaccctctaatccctcacctgtgtctctcattggccaaacccaagtggaagccagagagtaaggaaacccattgatgccatctacctgggtcattctcccagagcacagagaagagttgaggaagatcagtgcagatctggaggcaaaaagcagacactcagctgttttatcattgtcctttcagtcaaaaaaccaactaggatgtcaattccaaagtccccaacccttcccaacttcagcatgccaatgaaatcacatacatatgaatccttgaatctcattagttaattttcctccatcaccagtgcaggcttcctagtcctcaacctaacatcctttctgcaatcattccagggagctcccagtgtgggtgagtctcacatgtgcttacaaataagtcagctccaccaggtacgaaagtgggttcccgctgtgggacactcttcttcaatattctgttgacatgaagccaaggttgcatgatagagtggacaaaatgggtagggagaaggactttctcctcatttgtacagcacttgggaagaagaatacccaaacttgcttaagccccagtagatattttattttttattcccaagaatctactcatgcataaagctaagatggacttctcttgggccaatgattcaagtgcaaggaatttattcgcaagatcattccagaaagctctagtaggagtgaggaagagtaggttgctgctgtgggcaactggggcttaatcccaaagagcatcctttgggagactctgtggatcatatccatgaattcccacagagagtggcgaggaagctggggtatttatccaccatctctcattcatccctcatatgttgagggttgctcctgccccacacaagagaaagttcccaggtggagagtctcaggtgttcagtcagatgctgtcagcaagcactagaatggtaagttccaagggtatacaggggtgcaccccccatacatccctcaactagcctgaaattccataaaagcagagactgggcctatataattcaccattctattctcaacaacttgtccgggagttggcacacggtaggtgcccaatacaggttagagggtaagggaataaacataaaataaagttgagacaaacctaaaagagactgtttcatcttcaaagacttagcctaaagggggtgggagaggagtaaacatttattagaagcttccacagaattcatgcttctgcaaacctgattgcccctaaatttagcacatcagtagttccaaagaagagactttaagacatgctttaagacaacaacaggtgtgaatctgcctcccagatgacaattggcaatgtctggagacatgttatattggttgtcacaactggaaaaggggtgctgctggtagctaatgggtagggaccagagatgctattaaatatcctacaatgcacaggacagctccccacagcaaagaatgatttggccccaaatgtcaataatgccgaaattaagaaaccttaggttagagggtggatacgtgaaccaattggagtcaatagaaaaatcaaccacaaggtcgagtgcgatgactcatgcctgtaatcccagcactttgggaggccaaggtggatggatcacctgaggtccggagttcgagaccagcctggccaacatggtgaaatcctgtctctactgaaaatacaaaaattagccaggcatggaggtggacacctgtaatcccagctacttgggagactgaggcaggagaattgcttgaacccggaggcgggggatgcagtgagccgagattgtgccattgcactccagcctgggtgacaagaacaagactctatcttaaaaaaaaaaaaaaaaaaaggaagaaagtaaaagaaaaatcaatcacaatactaggagtttctctcttccctggaaggagcaatatggcacctattttgataacacagagagaaggctggagctgtgtgatgtcgggaagagaggttctactgggtgccatgtggagcatgtagatgaaactgatgcccagagaaagctgtagagatgaagagaaactgagccattgttgaccacatttgagccactagatcaattctcccctgaagtaggtccttttaatttatatgagctaataaacccctttcttgtttaagccagtagacttttgtgtcatttgcaaccaggagcactccaactgacagaatcaacgaacattaaatcctatcctcctttcctgaagacaccagtgtaaacagaaccttgtcttggagcacgactggttgcgagtaacagaaacccaccgaagctggcacaagtaaagaagtatttattacatgggtccaaggttatctccaaaacccataggagcatgaagtaaaagtgaaattcatgcagaaccatgatcagatacttagaaagcaattaataaatacctgttgatctcaatggaatgaacactcaattaactggaattgataactgcactgggagccgagataacccccccagccctcaaggagccatttgagctctcatttctgattctccctgaatattagcttcattcttctgccctgtttgcttgtctctttgcccaccacctcgaattggccactgatatttctaaatctgattgtgaccttaagagctccaccaactgacaactttcttagcctctccattaaagaaagttctcgagcaaaagaatctgattggctcagcttaagtcaggtgacaaccactaatccaatcggtagtcatctgccaaaagaggaagcataagtagactggcaagtcaaatgtatttaccccaagatgggagctcaagttagccctgggtgggggagatagaagtcccactgccaccactccccaccttacctagacacagaccaacaacactgagtgttaactattcctttattaggtggtgaggggagtggggggctgtacaatgcagggcttgggaattcagctacacagggattttgaccagaagccatattacaaaaatagcctaaaaatacctctattctgccatgaggctgggccagaggattaccaggaagagaaagtaccactcaggcagctcctcttcttgtagtcccacatttacagggacacaaaggaatgcatacatctgccctggctcccatttcccaccagcagccccctagttcccaaagggagatggccaagggtggggctggggcagagggagttggcagtgggcccttccccagcaaggctatggaacatgtcccatctggaatgcagtgaagtgagggaggtggggtggggaggaggctcccaacactcccccgacccctggccccagtgggtgcgcccaagggtgcctacttggtacatacctgggtcgtgtactcggtacacgggatcccagtcatgcctgtgtactaggtacacagaatccagcttggccgaatgggcccacagactcagccccacgggggcactggggggttcacagggggagggagcatctccatatatatattttgtaaaaaataataataataagtttgtttaaatgaatttgtttctatacaaaatgtaaaaaaaaaaagaaaaataaaaataataataattcattcatgtcagagtgtaaggaaatgagaggccagaaggagagagaaaggaatgagggaagagagaagtggggaagaaggaggtcccagactcttcacaagactgagagggtgggtggtagcccccacccattataaataaaggaagactgaagccctgggctgatgacctatctcggtcacgctgcaaggcaaggatgcaggagggttggtggaaagagaagaggatgaaaaagactaaaaggaaggaagagacagagaaagaaaggaggcaggacgggggtctctttaggcccccaagatctaagaactgacgagcgtctcaggccaacacttgcctcttgggggtaacttccggctggggccccagctgggtctgggcctgagcaagggagctgggaacagacaagggaagtggctgggcaggcagtgccccagtggtggtggccatggccccagtggcagtggctgggctaggcgtggattcggaccagtctgagagggagggaggtgaggggctggcccagtgctcaggggattcgggggatggggtcaggtaagggtgctcactgggaacccgcaggaagcgggcctttggggggctgctgtgtgccccagccgccgggtactcctcgccatgtcctgggactgccaggtaaggcgggggccgctcctgcggggagacgggggtccctgggttgagcagctggggtcccggcgccagtggcagcaggaacgaggggcctggaggggcaggtgggggcagccgggcccaatcgaggggcacagccacagggttcagcaggcccaggctgagtacacatcctccagggggctggcgccctagacccgcccggcctgggccaccaagctgtgccagagacactgcagtggcagtggcagctgcatagggcccctcaagggggaagccaccaggggaagcagggggcccaccgaaaggccgcggggagtccagcgagtccacgggcgacagcgtgaccgagctgtcagccagggggcccgggcaggccagcgtcagcttcttgccccgcccccggggcccctgcggccccagccccgccttcccggggggcctcctgctcttcttggaccccgactgtgccgctttgaggccagggaggaaggcccctggaggacagagcagaggccccaggccgtggggaccgggggggctgcggggcccactgggttgatccagcaagcgcacgatgtcctggtgcagtctctcctgggctacgtcccgcggcagcctgtccaggtggtcggtgatctcacggttggcaaagtggtccaacagcagcttggcagcctcatagctgccctcgcgggcggccaggaataggggggtctcctcctggggggccagaacccacagaggtcagcgaaaccccagctaacagtagcaaagtcttccagcctcttgggggagcccgagagctatgagtttgtacactggagcttgacagacctgggttaaatcccggctgtgctgggggagcctggacaagttctttcctctaaaccacattcatccatcacctactaagtgccagaggtcaaggccaggactagggtgagttaagcgaggtactcaccttaggcataactttttttttcttgtctttttttttttttttttttgacagagtctcactgtgtcgcccaggctggagtgcagtggcgccatttcagttcactgcaacctcagccttccgggttcaagcgattctcctgcctcagcctcccgagcagctgggactacaggtgtgcaccactacgcccagctaatttttgtatttttaatagagacagggttttactacgttggccaggctggtctcaaactcctgaactcaagtaatccacccatctcgacctcccaaagtgctgggattataggcatgaaccaccacacccagccattaggcacaaaatttaaggggcccccaaaaactttagtcaccaaagtaaattatattttaatccaatgtttggggttttattttgttttgttttttgagagagtctcactctgttgcccaggctggattgcaatggcactgtgccactgctgacacccagtggaccaagggctggggctcaccttgctatcctgcatgtccttattggctccatttttgagcagggccaaagtggcttccacgttgttcacagccgcagcccagtgtaaggctgatttccctggaggatgaaggggagagaggtcaggaccaggcacctgtcctggggcccccatgtcagggaggcagaaattgtctagaatgtggcctaggggtagaggaggcaggcctgccgtgaatatccaagtacttgtgtctggatccatgtgtgtgcaaatctgcaaaatgactctgtgcaatggggaagcactttgtgtctgtgtgtgtgtgtttgtgtgtgtgtgtgtgtgtgcgtgcatgtgcatgactgtttatacacagggggtgctgtgtggacctccttcagttgaacctagggttgtgacatccaatacagtagtcagtcacatgtggtttttatttatccatttatttatttttgaggtagtgtcttgttctgtcacccaggctggagtccattggcacaatctcagttcactgcaacctctacctgctgggctcaggcgattttcctgcctcagcctccctagtagctgggactacaggcatgtaccaccatgcccagctgattttttgtatttttgatagagatagagttccactatgttgcccaaactggtctcaaactcctaagctcaagtgatccaccagccttggcctcccaaagtgttgggattacaggcatgagccaccgtgcccaacctacatgtggttctttagatttaaatttaataaaataggtgccaggaccattcaatggggaaagaatggtcttctcaactaatggtgctggaacaactgaatattcacattcaaagaatgaagttggacccctacctcacactttatacaaacactaactcaaaatggatcagaaacctaaatatatgagctccaactatagaactaaacatctagaagaaaacataagagtaaatcttcatgaccttgaattaggccaagattcttagatgtgacaccaaaaccacaaataacaataacaactacaaaacagataaattggacatgatcaaaattgaaacttttggccaggcacagtggctcacgcctataatctcaacaatttgggaggccaaggtgggagtattgcttaaggccaggagtttgagatcagcctgggcaacaaagtgagaccccatttccacaaaaaatttaagaattacccaggtatgctggcacacacctgtaataccagctattcaggagggtgggatgggaggatcacttgagcctgggagtttgaggctgcagagagccgtaatcatgccactgcactccagcctgagtgacagagtgataccctatgtctaaaaataaaagaaaaaaaaagtggtccatcgacacaatggattattattcagctgaactatgctacaacatgggtgaaccttgagaacataatgctaactgaaaaaaaggcagacaaaaaagaccacgtatcatatgattacatttatatgaaatgtccagaacaggcaaatccatgaagacaaaaagcaaatcagtggttgcacagggctggacagatgaggggcttggcagatgatggccaagtggtgagaatttatttttcaggtgatgaaatgttctaaaattgattgtggtaatagttgtatgactctgattatactaagagccattgaattgtacactttaaatgggtgaattgtatggcatgttaattatatctcaataaagcagttttttgttttttgttttttgtttttaaaaaaaaggatggactcagtggctcatgcctataaccccagcactttgggaggccaaggcaggtggatcacctgaggtcaggagtttgaggccagcctggccaacattgcgaaaccccgtctctactaaaaatacaaaaaaatagccaggcatggtgatgggcacctttagtcccagacacttgggaggctgagacaggagaatcactggaacctgggtagtggaggttgcagtgagccaagatcacaccattgcactccagcctgggtgacaagagtgagactctgtctcaaaaaaaaaaattaaaaaaagggcaacataaggagaaaaaaattaaatgaactaaaacatttacttcttcatttgcctcagtcacatttcaagtcactatatgtggccagtggctactatactggacagtgcagagaataattccatcatcacagaaagtcctattggccagccctgccctagaactgtggctctcaactaggagaaactccctgcccccagcccccagagcatttggcaacgtctggagactgttttttttttttgagatggagtctgtcccccaggctggagtgcaggggcacaatcacggctcacagactcaacctcctgggctcaaacgaccctcccacctcagtttctggagtagctagggccacaggtatgcaccaccgcacatggctaatctttcaaaaaacttttgtagaacccactatgttgcccagtctggtctcaaactcctggcctcaagtcatcctcctgcctcagcctcccaaagtgttgggatcacaggcatgagccaccacacatggcctgatgtgtacgtttattataataacttccagcaggtggaagtacagtgtgtccgtctaacaaagcaggtggaaatgaagtatctaggggaaaggcacctttttctaaatccctgaggcaccctaaggactagtggtgaccctgcatgaccctgcaggcttcatgaagcctggttatgtgtgcgtgagcttcagtgattgggtctcaacatgggtatgaatttgcaccaacatgaccctcagggcccaggtgacaccaacccagcttagacttgattcctctgccaacctaccaagctcatccacagcattgacatcagcatggctggcgatgagctcttccaccatgccctctactgccaggcgggccgccaggatcagtgccgttgagccatctgccatgcgggcatccaagtctgtagagcggtttcggatgagaatctaggacagagagtggatgcagcaggaggggtcatggcaggaacagaggaatcaggagcacccctaagtcccatgaagtccccaacccccataccccaacccctgaaattggtgaggttcagggagcagctgcttgacagatactgtattcccatatatccccattttccaaatgagaaaaaatgagtctgaaaggcagaactggggctcaaacccaggtaagtctaatgcctgccccagctctgaggtccaaagtgtgtgcctatctcacctggaagacaccctgggcatcggctgtgacagctgtgtgcaggggagtgcggcctgagtggtcctgggcattggtgtctgccccagcatccagcagccgcttggctgcatcagcacgggcataacgggcagccaggtgcaaagcagtctcgccagtacggtcagtccgtgccccaagctgagccccctggcagatcaggtcggagatgatgctagctgatgtgtcatctgcctcatcctcttcagttggcattggctccagagcccccccacagaaggaagccagcattagcggggtgaagccatctgcagggacaggagtgtgtcagcaggaaggtaaacacagggccttttccaggaaatgttatcaagggtaccccattaggagctaatgggacacatggaaaaatgacaattagcagatcctcctgtctgcacacccacacccagaatgaggattcgtgggcacgtgatttgtcacagaactactcctagggcacagggaacacaggacaagggactctgggagtcaagcaagtgtgcaacctccagtaaattcccaaagggttattccaccttgatcctccaaagggactctggaacatgtgttgtaccccagagttctaatccaactcaaggcaaagaaaccatccccttcatactcctgcacccactggttaggagctgcccctttctgccaattcatttgagtgttttaaaagggggggggaaaaaaagagctgcccccagggacataaaatcccaggcacttcaggccccagcagccagagggacttcaaaagagagccataagtacaggccatttggagcataagcaaaatgaagctaaggcaggaatgccctgaaacataacaaagatggatctaagaggatcaaacaacatagtccgctacactgcacacactgtacacaagcacttgtcctcatttttcttagggagccacttgcatccggttctccattctcaagccctgggtagagactgacctccccgctccaccagcagacccgacccccaccagctcaaagacaggtatgtgaatcaggcttggtcaatttgcatattccagccccctggtcatactgattggctcaaggatgagcacgtgaccctagtctgtccaatcagaatgcatcctgagacttttctggagcattaagaaggttttgtaagattggagtcaaagggtagagaggggaaaactgagtcctggatccaaatgtgccacttttagttaaatgagttgataaatcccttgttttacttaagctagtctgagttggacctttgtcacttccaaccaagagtgttgctgaatacacacacccttcacagaagcttagagactcccccagttctccccaaaacacagagtcagaaataacctctcacaggtaggatgggtgaggggcatccctttgggaggggcactgtcactaacctgggccacgcacattgacatccatgccatcagcatctgcgtcgccctgtggtggtgtcagtgccatggctggtgccacgcggatgtcagcagcaaccagatggtgttgagtccactgacggcaatccacagcctcctcagcccccatgcctggctcctctacctggaggggcaggcaccctggatctcagatctcaccctttggtgctggggagagccactgccagggatggggctgggcattcctacaggtttctctttaggagatacacacagagccctgggaaatcatttaccatctgtttggtgttttatttgtttttgagacagagtctcgctctgtcccccaggctggagtgcagtggcatgatctcagctcactgcaacccccgcctcccgggttcaagtgattctcctgcctcagcctctggagtagctgggattacaggcacatgccacggtgtccagctaattttttgtatttttagtagagaaggggtttcaccatgttggccaggctggtctcgaactcctgacctcaggtgatcagcccctctcagcctcccaaagtgctgagattaacaggaaatcaatgtgtgccatagcccaaggaggtaataaaaggaagacacaaggtttctttttttttttttttttggtctttttgagtaataaatggctttaattatttatgtatatattttttagagactgagtctcactgtgtcactcaggctggagtgcagtgctgcaatcatacctcactgcagcctcaacttcctgggctcaaatgatcctcccacctcagcggcccaagtagctgggactataagcacacagtataagcagattgggatagcatctgatccaggttcaagttccaaccccaccccttagtagctggaaggctctgggcaaatcactttgaagctctgagcttctcattggcaaaatcaggatgacgcagccattccaccatgctaagataccaccacaattacattgggccacccctttaatacctctaatacctactttgggatgggaaggcagaaggaaaagtctgggttgagcaggtttttttatctgtccactgtaatagatgattccatttcacaacattaaaatatggacagaggaagggagtttgtaaattgaagtatatgtcaatagctactttacagcgtcctcagagagatgaaataagatgttttatgtgcattagagacattcagcgggtgcctcagtaatgctagcaggatctgtatggactcaattgtgccccctctaaaaatcatacaatggccgggcacggtggctcacgtctgtaatcccagcactttgggatgccgaggcgggtggatcacttgaggtctgcagcttgagaccagcctggccaacatggtgaaaccccatctctactaaaaatacaaaaattagccgggcatggtagcacatgcctataatcccagctactcgggaggctgaggcaggggaatcacttgaacctgggaggtggaggctgcaatgagccaagatcacgccactgcactccagcttgggcaacagagtgagacctggtctcaaaaaataaataaataaataaacagaaatcatacactaaaaccctaaataatatataaaatttccatgtgcctgcatttgaagataggactttatttttagacagggtcttgctctgttacccaggctggagtgaagtgatgcagtcatagctcactgcaggctccaactcctggactcaagtgatcctcctgcctcagcctcccaagtagctgaaattactggtgcaagctaccaagcctggtgagatagggcctttaaggaggtaattaaggttatatgaggttataaatgtgggaccctaatccaataggattggtatccttacaagaagaggatgggatgtcaaatctgtctctctctctctctctctctctctctctctctctctctctctcccctctgtgtacacagaggaaaggccatgtgaggctacagtgagaaggcggccatctgcacaccaggaagagagcccttaccaggaaccagccctgacagcaccttgggcttggacttccaacctccagaaccgtgaaaaaattaatttctgttgtttaggtcacccatgctgtgggacttttttttttttttgagacggagtttcgctcttgttgcccagtctggagtgccaggttcaagggattctcctgcctcagcctcccaagtagctgggattacaggtgcccgccaccatgcccagctaatcttttgtatttttagtacagacggggtttcaccatgttggtcaggctggtctcgaactcctgacctcaggtgatccacctctgtgggattttttaatggcagccaaagctgactcatactgaacccaggggcatgactccatgagctcagaaccggctcagagcactttcaggctaagtccatgctggacaaaataggaactgacagagataaggcagactcgctctctgggctggggggacacctccaggaagagtgcaggctggccaggaagcaggatcctggctggggaggggcaggatggaggggaggattttccacctgcccggagggacccttggggccccagtggcaaatcttcctccctctgaggtcacagaaccacactgagaagaaagggttgcaaagctgggactattctctggagctagggaggtggggacagcggtgccatcccctgatcacgcccatcatccactggggaccccacccagtaccctgaggggaggggtcagaggagggggcaaaggtcagagggggggcagtacctttagccgcttggcctctgggcactctgtgtccatccagtctgtggccacctcccccatcaggctctcacccttggccatgttcctggcggacaatgggaagaggggatgtgagggggacactagaggtgtccagctgggaaggaggatttggggtggggtcagaggtctgagtcaggtcaaggcggggtccagggttcacaaggtccccgtagtcagggacagggagcgagcagggttctcacttcatgcccagcgcgtcctggcccacgggttcccgccggcccttgtgaccagaggccacgtccttgtgcagtgagaagccctcagggaaccagagggtgctgtgctcgcgcttgcgccgggccaccatgacacccaggacgagaatgaccagcagcaagacagcgcccgccactagcagtggcagcagcgggacgctgggttctggaggctccagcggctcccctaagagcaggaagcagagggcggggcttcagccgagggcggggctttggcctcaggcggggcttcggccgcccccagctccgcccccgccaccccctccccaaggcagggccgcaccccgcacgtcccgcagtgggtacgggaagtccaggcgctccaccgctgacaacgctcccaggtagtcagcggcgctctgggcatcggggaagcagtgatcattctcaggcgactgcaggcagagccggttgtcaatctccagcattactaccgagctgcagggacagcagggagggaccagagggctcaaaaattgcccgatgcaccccctggtaccaagccccactttccctccccagcgcctggctctgaagcgccatctccacccacaggtctccatggcccacctgcatccacctggcatccaaccccactgcacccctaaaacgtgtcttgctgtggtcagcagtccccccagagccatgaatccaatggatattattttttgatcttgcaccgaggctggagtgcagtggtgcgatctcggctcactgcaacttcccctcctgggttcaagcgattctcctgcctcagcctcccaagtagctgggattacaggcgtgtgccaccatgcccagctaatttttttgtatttttagtagagacggggtttcaccacgttggccaggctggtcttgaactcctgacctcaagtgatcctccctgccttggcctcccaaagtgctgggattacaggcgtgagccgccactgtgcctggcctgttttttttgttgtttgtttgttctgttttgttttttgagacggtttcactctgtcgcccaggctagagcacagtggcgaaatcagagctcactgtagccttgacctcccgccttcaagcaatctttccacctcattctcccaaagatctgggaccacagacatgtgccaccacacctggctaatttttggggggggttgggggtggaggcatagagattaggtgtcactatgttgcccaggctagtcttgaactccggggctcaagcaatcctcccacctcagcctcccaatgtgctgggtttacaggcctgggccactacgcccagccaagggacattgtttgttttttgtttttgagatgaagtcttgctctgtcgacaggctggagtgcagtggtgcaatctcagctcactgcaacctccgactccctggttcaagtgattctctgcctcagcctcctgagtagctgggattacaggcacgcgctgccacgcccaggtaatttttgtatttttagtagagacggggtttcaccgtgttggccaggacattgtatttgtttgtttgtttgcttgttttgagacagagtttcactcttgttgcccaggctggagtgcaatggtgctatctcagctcgccacaacctccacgtccagggttcaggcaattctcctgcctcagcctcctgagtagctgggattacaggcatgcgccaccacgccccagtaattttgtatttttagtatacacagggtttctccatgttggtcaggctggtcttgaactcccgacctcaggtgatccacccgcctcaacctcccaaagtgctgggatcacagttgtgagccatcacacctggcctcttcctcttttttgagctaattccattcatccaatccttaggtctccgtgtccccagattaattcttctgttccttctctccccactcctttgagtccctctcatggcttcaatgatcatcaacacttttatatctttcttgtttgtgtctttagcccccaggtatctccttggaggccttcccaatacttccaggtccctcagactctgcaagctccaaaatgacctgtttttcactttgtggccctatcactcagcttagccaggggctggtacaccaaccactctccttcatccctctacccctccccttccaccacccacatcccaatatctgcaaaacccaaccctcctctctgtatcagagacccacccctctcaggtctctgccttctcctcaacaatagctacacctcccttctggtacctctaccaggccactagcaggatacttctatattttttctttttctttttttttttttttgagacagagtctggctctgttgccccggctggagtgcagtagcacaatcttggctcactgcaaccttcacttcctgagttcaagtgattctcatgcctcagcctcctgagtagctgggactaaaggcatacaccaccacgcctggctaattttttgtatttttagtagagacagggttttgccatgttgcccaggctggtctcaaactcctgacgtcaaatgaactgccttccaaagtgctgggattacaggcgtgagccaccgagcccctcctatttctttcttcttcttcctcttcctcctcctcctccccctccccctcttccttcttcttcctcttcctccccctccccctccccctccctcctccctcttcttcttcttcttcttcttcttcttcttcttcttcttcttcttcttcttttttttttttttttttttttttaagagatcggaggccgggcatggtggctcacgcctgtaatcccagcactttgggaggccgaggcaggtggatcacgaagtcaggagatccagaccatcctggctaacacactgaaaccccgtctcttactaaaaatacaaaaaattagccaggcatggtggcggccgcctgtagtcccagctactcgggaggctgaggcaggagaatggcatgaacccgggaggcggagcttgcagaaagccgagatcgcgcctctgcactctagcctgggcgacagagcgagactccgtctcaaaaaaaaaaaaaaaaaaaaagagagagagagatgggagtcttgctatgttgcccaggctagatttgaattcctgggctcaagtgatcctccaagtagctgggactacaagaatatattgtgcccggctttatcttctatgtctttaagaagaagaaaattagcccggtgtggtggtggatgcctgtaatcccagctactctggaggctgaggcagagaattgcttgaacccaggaggcagaggttgcagtgagctgagatcacgccactgcactccagcctgggcgacagagactccgtctcaaaaaaaaaaaaaaaaagaaaagaagaaggagaaggagaaggagaaggagaaggagaaggagaagaagaagaagaagaagaaaaaaaccctacacatgtatttaaccactctgccaagccacttagcaacctgcctccccacaagccagcactagacctgggcaattctaccccagaagcactagctccatctggaggcattttttgcttgtcacagccaggaggcggtgctcctgacatctggtgggtaaaggcattaagtgaaatgaaacacacaagacctggatcaacagcatctctcctctccccagccaccacggcttttccaggtggggtcactcacccgatcacctcgggggccagctcccgacgggcccggggttcggagccaggactaggccggtggtaagggaagaccatggcctggccgtgcgcgtccaggcggaagcgcagcgaggtgcgcaggatggcgctgagccgctgcagaaagtcggcgctggaacgcagtagctcctctggcggcagcagcactgtgagcaccagcacgccgcgggccagcagggccggcacctcgctggcacaatccagcccatcccagccgcactcctccgtgttgcagccctggtcgcagcggccgtcggcaaagtggtcggcgcagtacttctcgtacaccgggctggtggggaagggtgaggcagagaggggcggagtcaggggtcagaggagacaatccccttccatgcattcacaccgtagagtacagagactccagacaaggcttgcacaggggactggaatatacggacccatgccaggctttctgcaaatcttgccattcactggataattttttttttttttttttgagacggagtcttgctctgtcgcccaggccggaatgcagtagcatgatctctcagctcactgcagcctccacctccccggttccagcgattctcccgcctcagcctcccaagtagctgggattacaggcatgcaccaccacgcccgtctaatttttgtatttttagcagagacggggttttactatgttggccaggctgctgttgaactcctgacctcaggtgatccacctgcctcggcctcccaaagtgctgggatcacaggcataagtcaccgcacgcagcccttgataatatttttttaaattgattgattgaaatggggtcttgctctgttgcccacgccggagtgcagtggtgcaatcatagctctctgcaatctcaaactcctggactcaaattatcctccctcttcagcctcccaagtagctaggactacaaacccacaccacactcccggcctcactggctaactattaattaatcagtaaatactaactgactaccatgtgttgggcactgctgcaggcacaaggataaggcccggccacaattcctggtccacgtgcagctggcattccactgggtgaagacagatagtaagggagatacatgagccaaatatacagcatctccattactcatcaataaaataaaaatacaggctgggtgcggtggctcatgcctctaattccagcactttgggaggccaaggtgtacggataacctgaggtcaggagttctaggccagcctggccaaaatggtgaaacccccgtctctactaaaaatacaaaaattagtcaggcatggtggcgggcgcctgtaatcccagctactcgggaagctgaggcaggagaatagcttgaacccaggaggtggaggttgcagtgagccaagatcacaccactgcactccagcctgggcaatgggagagaaatcctgtctaaaaaaaaaaaaaaaaaaaatacatatatatatatatatatgtatatatatgtatatacacacacacacacacacacacacgcacgcacacacatagtgctggatggaattaaatgctaagcagaaaaataaagcagaggaagggctgggggtgaccagggaggtgctcactgagaaggtaccaccatttcagcaaagacttgaaggaggtgagggaggagccatgtgggggaagggaacagccaggcagtaggaacagcttgtgcaaaggccctgatatgggatcaagcctggggtatctgggaaacagcagagaggccagggtggctggaacagagtgagtgaggggaaagcagagaagatgaggatgtggagattaagggggtggagggttccaagcagacagagaggtacgcagaggacagaaggggcagggtgtagggatggacagatggactgcctaggacagacagagagaggggcagaagaggggcagagatagtcaggggcacccacagatagccatatagaggagcaaaaagagtgcatggatggacagattcggcccaaggatggacaaacaggagtggaggaagacagttgggtacacagaggaacaaaagcaatttttttttttttttttttttttggtgagacagagatttactcttgctgcccaggctggagtgcaatggcacgatctcagctcacctcatcctccacctcccaggttcaagcaattctcctgcctcagcctcctgagtagctgggattacagccatgtgccaccacacccggctaattttgtatttttagtagagacggagtttcaccatgttgcccaagctcaaactcctgacctcaggtgatctgccctcctctgcctcccaaagtactgggattacaggcgtgagcactgtgcccggccaataaaaggaatttttaggctagatgtggtggctcaggcccacaatcccagcactttgagaggctaagctgggtggattgctttgagctcaggtgttcaagactagcctggacaacatggcgaaaccccatctctaagaaaaagcacaaaagttacccgggcgcggtggctcacacctgtggtcccagctcctagggaggctgaggtgtgagggttacttgagcccaggaggtagagattgcactgagccaagatcacaccactgcactccagcctgggccacagagcaagaccctgtcttaaaaaaaaaaaaaaaaaaaaaaaaaaggagccaggtgcggtggctcacacctgtaatcccagcactttgggaggccaaggcgggcggatcacaaggtcaggagttcgtgagcagcctggccaatatggtgaaaccctgtctctactaaaaatacaaaaaaaaagccaggcgtggtggcaggtacctgtagtcccagctactcggaaggctgaggcaggagaatcgcttgaacccgggaggcggaggttgcagtgagccaagatggagccattgcactccagtctgggcaagagagcgagactccgtcttaaaaaaaaaaaaaaaaaaaaaaaggaattcggctgggcacggtggctcacacctgtaatcccagctactccagaggctgaggcaggagtactgcttaaacccgggaggcagaggttgcagtgagccgagatcgcgccactgcactctagcctgggccacagagcaagactccatctcgggaaaaaaaaaaaaaagtaattattggatggagaaaagggcagacaaacggggcagagaagtgcataggcagatagaaacaagaacaagatagacagagcacatggatgaacagacacacggacagacacgtgggacacaccgatgggcagatagagtgcacagagaaacagacggggcaagtggatgggcaggtggaaagagaggcagggcccacggacaaacagactgggatggatgcatagacagacggatcgatcgggtggatgggctcacttgcaagtgcgctcgcggccaccggcgtggcagtcgaagttgtcgtagaggcaggcgggcgagctgcaggcggggtcgcagcggctgttgttgaagaggcgccagcactgcagcgcctcgcattgccgccaggggtcgcccacgctcagcgagcagtcgccgccgtcccagccgcagcctgggctgttgcactcgcggtcgcagcgctggtccccgcgcttggcctggcaggcggcgcgcgggcaccgcggctcctccgagacctcgggtgccgcggcgggcgcctcgcagcgcggcccggtccagccctgcgcgcaagcgcagcggaagaagggcgcgagcggcgcggggcggcaggagcccccgtggagacagggggcggccgcgcagctggcgttgctggcccccggcggcgaccccgggaagctgcggcaggagggtcccgacaaccctggggggcaggcgcagcgcggcccgcggggcgtctgctggcatgggacgcccaccgggcactgcagctcccggcaggagcgcgccacccgctcgcaacgcggaccccagaacggctgggggtcgggtttggggagggagggataaaaatgagggtggggagtggagggaaggaggagaagaaatggaggagtggggaaaagaagagtcaaggggagagagggggaagagaagaggtcaagactaaggaaggttgagaccccctcaacctccccatgtcccacccaaccgctcccctttccacactggagaccccacctggcagataagccctgccatcccaggaggccacgccccccaatcaccatcctcacccttttcccttcaaacctccaggaaatgtcggggcagggggttgtttctttgttttttgagacggagtgtcactcagtcgccaggctggagtgcaatggcgtgatggctcactgcaacctccgcctcccgggttcaagtgattctcctgcctcagcctcccgagtagctgggattacaggcagctgccactacgcccggctaatttttatatttttagtagagacggggtttcaccatgttgcccaggctggtctctaactcctggcctcaagtgatcctcccgcctcggcctcccaatgtgctgggattacaggtgtgagctaccacacccggcggaaatgtcagcattttccagaaactcccttcccttcgatgtctcccctaaagccacatcctcctcctagacgccacgcccctactactccagaggccacgcccctactcctcctccaaaggccgccacccacacctacctgggcacagtgacaggtgaaggtcagcccacccccaggacccgggctaggacggcactggcctccatgctggcatggctgggactcgcagggagacaggacagtctgacagcgaggacctgagcgagcgggagcatgtagatcagccacaatgggggaatgacaggcggggtcccaggccagccccttcgccaacgcttacctgagaagccagcatgacaaaggcaacggaaacctccgcctgggtcctgcaggcagtcccgggtgtgtgccgcgtggcaggcacctgagcgacactcattgatgtctgcctcgcagcgcaaaccagtgtatcctgggggacaggtgcagcggaaaccacccaccaggtccacgcaggtgccattgtgtaggcaccggggccctgagtccagcggtgggcctgggccgcagtcatcctcattaatctcgcagagcacccctgggggaagaaacgaggggtggtcaagagggaatgaagacagcctctcatcctgtccccccaaccctggccctggcatacccagcgttcctgggggacaggagcagagatagcgggccacgaggtcaatgcatgaacccccgtgctggcagggctgggaggcacactcgtccacgtcgtcctcacagttatcaccattgtagccaggaagacacttcagtggggtaagagagggacccactcagcttagtgggacacagacccacctggacatacccatgaagacgcaaagaaccccagcacaaaaggacacacacagatgttcagcgcactaccagtaggtaatcccagcactttgggaggccgaggtgggcagatcacctgagatcaggagttcgagaccagcctggccaacatggtgaaaccctgtcactatgaaaaatacaaaaattagctgggcgtggtggtgggtgcctgtactcccagctataatgagaggctgaagcagaagaatcacctgaacccaggaggcaaaggttgcagtgagctgagatcgcgccactgcactcgtctgggtgacagagtgagaacctgtctcaaaaaaacaaacaaataaaaaaacaccccagatctacccagagtgacacccacagatacaccaagagtcacaaaagcaaaaactcagacatatctagagacatacccataccaagccacacagaaatgtgtgcccagacgcacccaagcatgcccacctcctcttccctctcctggggagcgcccccttacctcacacatgtagccccccatatagccacggcaggtccccccatgctggcagggctgggccaagcaggggtccacctcctgctcacagtggctaccagtacggccctctgggcacacgcagtagtgggagctgtcttcatccacacactgcccacccgcctgacacagctgctccagccgcacccctgcaaagaggagagtggcacaggaacagaggtaaccccatacatcccccttctgcctccatcacacagatcattcaacatccttggtggaatgagtccccaggatcgcacccacactccatcaggttgtcacacatccccccagcaggcaaggtctcatcactgacatacacacacatgccttcaacgctcacagcagctcggtcacaccctgtagcacacacaccatccctgctgtctcacagtgacagacacacaccatcccggccagttgtcacatgctcacacacccacaccactcagccacacaccccatcatgccccataggctctgtggcacccccattcggctcacactagcaggaggtacgtgcatgagccccttcccaaggccccacacgcccgcccacatgctcccactcaccgatctgggctgcggcctccctgcagggcaagcttcggatgtcacagaggcgtccgctccatccagggggacaaaggcaataggccccagtctggacgcagcgacccccgttttgacaaggctggcggctgcaccaatccaccagcgtctggaggggaagcactcagagtcagtactgtggggtggggggtagtctgggagaaactgtgccccgacttggcttctccctcctaggatcccaggcaggctcctcccccaggtccccagtaactccacccacctggcactgcgggcccgtgaagctctcgaggcaggtgcagcggaagccagggtgggcggcgctgcagacgcccccgtgtaggcagggccgcgagaggcaggggtctgcctcatgttggcagtgggctcctgtgtagccgggacggcacaggcagctgaacgagttcacgccgtccacacaggtcccgccattgaagcaggagctggagcggaaggagtgggagggaggatcaggctccgccccctcacaggccctgccctccttcctgagtcccgctgttagcgctggggacgtcccactccctgacccttatctcggcaagaagctgcagccccagcagaagccaatcaggtcccttagctccaattcaccagggacttcagccctaaggtgagagccacctggaagccatgccctctcaggcaccagagactccaaggtgagctccaaacagacgccctgctccttccctggccctgccccatcagtcatcagagtccgcagtgggtaccaagctgaggactcccccaagtcgttgctgtccccacttcgtcccaggtcccaggccccatcccaagccagagtccctgctctccaagcagaggccccgcccacctggggctgcagtcgggcaggtcctgttcgcagtggaagcctccgtagcctggcgggcaggtgcaggtgaaggaggccacgtggtcggtacaggtgcccgggccgcaggggttgctcaggcactcatccacatcgcgggcgcatcgtgggccggcgaaaccagggaggcaggagcaggaaaaggagcccacgccgtcttggcacgagccaccgttcaggcatgggtctgcggacaggaggaaggcggtctggtcacctaccttgcccccattagcccagtctgactgggatatgccttggattgagaagaattcaggaggaaaccaggttcaactgggatggggtgcatttggtcagaggaatctaaatccatccccttctgtggcctcgtcccctcctttatctggaaacctcacctatgtggcaagggcaggatgttgggaaaaccaaaaggtccctttaagctgccaagcaaacgctgctaattgtgcctgatctaattcctgtgcttggaacaggacaaggacagtggccattagccacatgtggctactgagtccttgaaattgtgactaaatggagatgtgctataaatgtaaaatacatactgggtttcagattttgaagacttggtatgaaaaaaaaaataggctgggcgtggtggcacacacttgtaatcccagcactttgggaggccgaggtgggcagatcacttgagctcaggagttcgagaccaacctgggcaacatggcaagaccccatttctataaaaaatacaaaaattagctgggcatgatggtgcacacctgtagtcccagctagtggggaggctgagacgggaggatcacttgagcctgggaggtcaaggctgcagtgagtcatgatcgcaccactgcactccagtctgggcgacagagtgagaacttgtctcaaaaaaaaaaaaggaaacaatgtaaaatatctcattaacaattttatactggttacatgttgaaatgatatgttaatatattgggttaaatagattatatacatttatttatttatttatttatttacttttatttttatttttattttttttgagatggggtttcgctcttgttgcccaggctggagtgcaatggcacgatctcagctcaccacaacctccgcctcccgggttcaagtgattctcctacctcagcctcctgagtagctgagattacaggcatgtgccaccacgcccagctaattttgtgtttttagtagagacggggcttctccatgttggtcaggctggtctcaaacttctgacctcaggtgatccacctgcctcagcctcccaaagtgctgggattaccggtgtgagccactgcgcccagccgattatatacattcaataaattaaatttaaatatattaaatttggtcaggcacagtggcagcagtctgagagtccaaggcaggaggatggcttgaggccaggagtttgagaccagcctagacaacgcagtgagaccccatctctacagaattaaaataaaaatattagctaggcatgtagtgagtgcctgtaatcctagctactcaggaggttaagacaggaggaatgcctcagcccaggagttcgagactgcactgagccaagatcgcaccactgcactccagcctgggcgacagagcctcactctgaatacataataaataaataaatataaaatattaaatttaatatctcccatttctgtttattttttaatgtggctactagaaaatttaaaattgcatatgtggcttgtgttatttatctgtttggcagcacccctttttgtttgtttgtttgtttgtttgttcgtttttgagacggagttatgccttgttgcccaggctgcagtacaatgacacaatctcagctcaccgtaatctccacctccaaggttcaagtgattctcctgcctcagcctcccaagtagctgggattacaggcatgcgccaccatgccctgctaattttgtatttttagtagagatggggtttctccatgttggccaggctggtctcaaactcctgacctcaggtgatccgcccaccttggcctcccaaagtgctgagattacaggtgtgagccacctcgcccggcctctggggggccttttatctcatactttgcacatgatattaactcgattgctctcaaagacagtgcacttaggtcgggtgtggttgctcacgcctgtaatcccagcactttgggaggtggagacaggtagattgcttgagcccaggaattggagaccaccgtgggcaacatggcgaaactccgtctctacaaaaaacacaaaatattagctgggcgctgtggtgtgcgcctatagtcgcagccactggggaggctgaggtgcttgagcccagaaggcagaggttgcagtgagcgatgattgcaacactgcactccagcgacagagctaagactctgtctcaaaaaaaaaaaaaaaaaaaaaaaaaaaagaggcagcacacagactccaaggttctaagcccagctcattccctaactcgttccatgggcttgcacaagaagtcactcaacctcctcgggcctcagtttccatataaataaaacgggaaaagtaagataactgtgaagatgaaatgacagcacagtgccaggcacacagttcaagcttaatgactgtgttccccagagcagcacccccaagagctcccctgcactcactggggtcacagtcattgatgtcctgatcgcaggaagggccagtgtaccctccatggcaggtgcagctgaaactccctgccaggttggtgcagataccatgagggccacagggtgcggggccagcacactcgtccacatcctgctggcatcgtgggcctgggggtagggagcaaggttacacctagggttacagggtacagagcagggtctcagggacctggggctcaggaagaacctgcaggccgagatgggtgaaggcaaaataagccgtgctgtcattcgtgtctgggcattttgcatatgcagtttcagaatggccgtctccctgtctcagtaggtggcaaatacctactatgaggtctgctcctccaggaagctgtaccctaaaccccgccctaagtcccagcatctctagccccataactcttcctcttccaagggctgacccacacaggctgcatatcagtgtccagctctgtccttccaagaaggaagcccctctcaaaggcagggctggggatgggtccctctctggatccccagcatcatccctgatagggtagggggcagaggagatggagaggaggagggaagagaagcaggtggcataccttgccagccctgggggcaggagcagacaggcagctggccaggggcagactcgcagcggcccccatgctcacaggggttcggggtgcagggggagaggagttcacactgacgtcctgttgggggtggaagagagggaagcagagatagccttgagggactccctgatcccatctccccccacctcccccaaccccagggtccccaccttgatacccacctcccaagctcctggagggaaatgattgaaagcaaaaaagaagctaacatagcgggaggagagagtagaggagaagagagatgagaaggcccatggtgttggtggggctgcagagggaaggtgaggtacacaccctggacaccaggcgggcaggtgcagtggaaacccattccatcgctgctgcatgtcccaccggccctgcacggctgggactcacaggcgtctcgggccaggctctggctgcagcgggggccactccagccaggctcacacacacagcggaacctggcaggggaaggtagtcaggccagggaggtgggccagggagagggggcagtgtctgaggctgagaagggccctcacccgccaggtgcatcatagcagatgccgtgactgcagggctcatgggcacagggatggctcggggggaggcagagtgggggcaaggagccaggcgggcagaggcagcggaagccattttccccatccacacaggaacctccctcgccgcatgggctggaagcacactcattgatctccacgttacaaaggggccctggggagtacacaagcaatctcatctcagaacaaagtcagcagggacaaccagggagggacgacgtgaccccacttagcacacccacacccccgagcaatgacctctttttcataacgcatcagctcttgtgcagattaggacacccgcctcctcaaccaagagctgacttgccccagatcattctggtccccaaacttccatgaagtccctttctttttcttttcttcttcttcttattttttgagatggggtctcactctgtcgcccgggctggactgcagtggcatgatcatagctcaccacagcctccacttcctgggctcaagcgattctcccacctcagcctcccgagtggctgggactacagttgcgcaccaccacgtctggctaattgtgtgtgcatgtgtgtgcgtgtttatctacgtattgactaatctggctttgggagtgtgtttattttttgtagagacagggtttcattatgttgcccaggctagtctcgaactcctgggctcaagtgatcctcatgtctcagcctcccaaagtgctgggggattacagacatgagccaacacacctagcaaagtcacattcatttccactaaggattagtttagacccattcagaaataacctagtcactgagtttggacactttcatctatgttccagaataatctttttgtttgtttttgtatgtgtgtgtgtgtgtgtgtgtgtgtgtgtgtgtgtgtgtgtttgaaatgaagtctcactctgtcgcccagactggagtacagtggcacaatcttggctcactgccgcctccgcctcctgaggtcaagcaattctcctgcctcagcctcccgagtagctaggactacaggcgcccaccaccacacccgactaatttttgtatttttagtagagatggggcttcgcaacgttggccacgctggtctcgaactcctgacctcaagtgatccacttgccttggcctcccagagcgctgggattacaggcgtgagccaccgcgcccagcctgcagaataatctcgaaacaaccttatgccaatgagacagcacagactcagggcaaagcacggacaacctcgttggacaagagtctgcaaagatacgggcaaaacaggcccacagagacgagtgacttcaccctcgatctaaggaccccctctcatggcagccacttgcccacctgtgaagccaggttggcagacacagtcgtagcggttgatgccatcacggcagactccaaaggtgcaggggttgctggcacagtcgtcaatgttcacttcgcagttcacacctaggggccaggaacatggcatggagtggccaccactgtgccccactagatgcaccattcccaaaccctctgtgcccctccaggtgtgctgtttctgccccagcccccggtcccacctgtggtcccagaagggcagcggcagaggtacttgtccaccaggtctaggcatttgccgccatggcggcagggctggctgcggcattcgtccacctggctctcgcagcgtgtgcccgtgtagccaggagcacaggcacatgagaagctggcgatgccatccacgcagcgaccatggtggcatgggtcaggggagcagtcgtccacgttgcgatcacacagcgtgccctcaaagcctgtggggccaagagggtcaggctccgcccacttgccaggggcctgcccacaagtgaggcctcggaccaatcctggttcagctctatctgaggccctgcccatcaagctgtcaggaggcgagctcaatacaggccccaccccccaccccccacttacttccactccaccccactacaagctccagaatttgtccctagccaagactctcccacagttaaatcccgcccccagctgtggccccacctccagccctgtttctgccccaccctccactggagatgggagcacatggcaggtgccaggggaaggtattgggccctccccattcagttacaggcaccctgtgcccagcccaacactttggctccacacgtagccttatgtcagtctatatgcattattggctccaccccccaactctgtcactgggtcctgccttgctacaaccccgcccccaagctctccccaagtctgttattggccctgtcgcccacaagccccgcctcctgattcttgtcggactgtcattggcccgcctcaccctcggcacagcggcactcgtagccatcgggctggtccacgcatttggcgccattcctgcagggcgtgctggcgcattcgtccacgtccagctgacacgtggagccgctgaagcctggggtggggagtgggatgagcagaggcccagaaagggtgagagcagtacacccctctccagccccgccttgtttgggtggaaaaacccatttacttggatttaaattaacttcaatgtttcataacatatggtttctattgtaagttatccgctaacgtggttttacaggttcccaccctggagtttttgccccttcccagacatgtcttttcgggctccctctcctgaggtcctcacccgaggggcaggtgcagctgaagccattgactcggtccttgcagaccccaccgttgacacaggggctactctgacactcgtcaatgtccacctcgcaataggttcctgtgaagcctggggcagggaatagggcttaggaaagcgggggctaccctatggtgtgaacggggtgcaaggaaggaggtacttcccttcctactcatcgacaaatcccccgagccttcgtccccacctctacactcccagcccaaccttaattttcagccacaggctggactgtcacccagccgtggtcccaactggcccaaggctcatgggtgtccgcagaggccttgccttcaaacccctcctcctctccccagtcctcagactaagccctttccccagtccccagcccccagccccagggccccccatagcctttgcccaggcttactgcaagcttgtctgcaggcttcaccttgacctcacagcagccccgactctgcctctctatccccaaccccttcccgagtgggtcctaaggccaagaatactcccagcccacctgaggttctactgactccatttgaccaagcccccagaatcacacagtattcccttctggtcctgaccccacctccttccaggcttcagtctctaagggtcccactccaaacccacttacaccccattctgctcagctccccatccgcgggcttctctgtccccgccccctgcctcaggacccgcccaggccacgcccaccacccacctgccatacagatacaggtgaactggcctatgcggtcgaggcacgtggcctggtttcggcagggccccgacagacactcgttgacatcggtctcacagcgaggtccagtgtagccacgaccgcactggcacaggaaggagccctgcgtgttcacgcacctgcccaagtgctcgcaggggttggcgcctgccggatggagtgcgatcggtgtgggcgtggctggccgggaccccctcctctcccctctttcccagcccattcacagacgatggagctcccctcaccgatagagcactcgtccacatcctggtcacatgccccacccgtgaagccgggaggacaggtgcaaatggcccggccgttcaccggatttgtgtcacagatagcatcctcgtggcaggggttgctgacacaggcgtcatccaggtgacacaggaggcctgggaagtggtaagcagaagtcataggcagatcttcctgctctgcccaaaaggcccacaccccttgagtattgttttgtcgttgttgttgttttgttttgttttttgagacgaagtttcgctcttgttgcccaagctggagtacaatagcgcgatcttggctcactgtaacctccacctcccaggttcaagcgattctcctgctcagcctcccgagtagctgggattacaggcatgtgccaccacgcccggctaattttttgtatttttagtagaaacggggtttcaccaagttagccaggttggtctcaaactcctgacctcaggtgatctgcctgcctcagcctcccaaagtgctgggattacaggcgtgagccaccgcgcccggcctgttgtttttattaaacctaaacagtatttagtagctgcttttttaatccatttattatgagaactatcaaacatacagaaaagttgaccattcatatacccaccacctagattcaactattgttagcttaatctaccaatcttcttttctaaaccatttaaaaataaattgcagaccgggcacagtggctcacgtctataatcctagcactttgggaggccaaggtgagtgcatcgcttgagttcaagagttcaagaccagcctgggcaatatagtgagacccgtctctacaaaaaatacaaagcttagccgggcatggtggcgcacgcctgtaatcccagctacttgggggactgaggtgggaggatcacttgagcccaggaagtcgaggctgcagtgagctgagatcatgccactgtactccagcctgggtgacaaagtgagactctgtctcaaaaataaaataaaataaattgcaaacatccacatattgttttaaaaccttttgactcttctgattacaaaagggtcctacactccagcctttgcttctgtaataccctctgccatgtatgccctctttctatatccacgttcccctcctaaacatgttctctgatctttgccacttccaaaggtaactcccaggagttccccattccaatggcttctgccctgagccatgcatcagtgcaatgtcagcctcctcccaagcctctcccaggcttacacttccccactaaagctgcctccagcatcatctttttttctctctcttttttgttatacacggtcttacactgtctcccaggctggaacgcagtggctcagtctcagctcactgcaacctccaccttctgggctcaagccatccttcaaccttagcatccagagtagctgggactacaggcatgcgctaccatgcccagctaattttttgtatttttggtagagatagggttttgccatgttgcccaggctggtctcaaactgctgagctcaagcaatctacccgcctgggcctcccaatgtgttggggttacaggcgtgagccaccacacccagcctaccaagtttttgtagagatgacaaaaactcactatgttgtccaggctggtctcaaagtcctgggcccaagcgatcctcccatcttggcctcccaaagtgctgggattacaggcatgagccactgtgcccggcctagcataatcttttttttattttttaaatttgagaaggagtctcactctgtcacccaggctagagtgcagtggtgcaatcttggctcactgcaatctccacctcctgggttcaagctactctcgtgccttagcctcctgagagacttggattacaggtgtgcaccaccacgcgcagctaatttttgtgtttttagtagagatggggtttcaccatattgaccaggctggtctcaaactcctgaccccagtgatccgcccgcctgggcctcccaaagtgctatgattacaggcatgagccactgtgcccagcctagcataatctttctaacactcaagtcagacttcttatttgccctcactaaaaaccatccatggctccctgcagagaaaacggccactcaccagtcttgcccatggggcaggcacagtagaaagaagccacgcggtcatggcaggtggccccatggaagcacacggctgtggcacagtcatcgatattctgactgcagctctcgcctgtccagccattgacacacacgcagctgtggccacccagcgtgttgaagcaggtacccccattgtggcaggcgttgggctgcagctgacactcatccacgtcctccgtgcagaactggcctgtggcacacagatgcagcagtccagccacctggcgcatgtccacccgaggcctgcctccccgctccctctggccgcagtgcccacctgtccactcaggagggcactggcagttataggtgttgacgccatccacgcatgtccccccattgagacatcggtgtcctggacagtcgtccacgttcacttcacaattctgaccctcaaaccctagcagggaagggggcaaggatggtcaccgccgggctggcctgctgtccccacgcccacccctctgactctcctgagtagggctcactcaccaggaagacaggcacagtcgtaagtgaggtcgccactctgcctgcaggtgcccccgttacggcatggtgagggtgcacagggcaccgcggggttctcacatagtggccctgtgtagccagctggacactggcagcggaaggagccaggtgtgttgaggcaggtgccaccatggcggcagggctcacccacccggcactcatccacgtcgcttcggcagctgcggccctggtagccaggtgggcaggagcagaggaagcgtccatcgggccccactgagcagcgggcaccgtgggcacaagggctgctgaggcagggatctggcagggagcagtcagggcctggagggaccaggacagggtgagtttaggactgaccacacccccgactacctcccctccagactcttcccctctcacctcggaagccacgggggcaccggcatgagaatcgggcggtgccagccaccactgaactctggcagacaccacggccagcacaggggcctgagtgacaggggtcctccagctgacaccgctcacccacccagccaggcgggcacctgtgggcagagatggcttggttgggcagcacagggcaggatggccccagacacaaagatacacacaagacaggcaagaaacacgcagggaaacagagcagcaaacacacatttgctgggagcagtggctcacgcctgtaatcccagaactttgggaggctgcggcgggcagatcacttggggtcaggagttcaagaccagcctagccaacatggtgtaaccccgtctctactaaaagtacgaaactttgctgggcatagtggtgcgtgcctgtagtcccagctactcaagaggctgaggcaggagaattgcttgaactcgggaggtggaggttgcagtgagccaagatcgcgccactgcactgcagcctgggtgacagagtaagactcggtctcaaagaaacaaaacaaaacaaaacacacattcattcatgcaacgaatatttactgagtacctactacgttctgagcaatacaaatacagcaacaaacacaatgaaaggggtccctatccctctggatccttgcagccaggtccaggcaaggagaacatatacgaataacaaattaatatacaacatgctggcagggggcggtgaaagccatcagaaccatgaaggatgtagtcagttgggtcacagcccctgaaaagatgacatccatgtcccagaacctgtgactaggaccttactttttttttaaatggctctttgcagatgtaattttttttttttaagagacggagtcttgctctgtcacccaggctgcagtgcagtggcgcgatcttggctcactgcaacctccacctcccggggttcaagcaattctttgtctcagcctcctgcgtagctgggagtacaggcacacgccaccaggcctggctatgcagatgtaattaaatgagagatgtcaagatgagattattctgaattatccacctgggccctaaattcagtgacaagtgttcatacaagagaacggctcacaactgtaatcccaacactttgggaggtcaagacaggataatcacttcaagccagaagttcaagatcagcttgagcaacatagggagactttttttccacaaaaaaaaattaaaaattataaccgggcatggtggcaggagcctgtaatcccagctactctggaggctgaggcaggagaatcgcttgaacccaggaggcggaggttgcagtgagccgaaattgcaccactgcactccagcctggttgacagagggagactccatctcaaaaaaaaacaaaaaacaaaaaaaacaaacaggccaggcgcagtggctcatgcctgtaatcccagcactctgggagactgaggtgggcggatcacgaggtcaggagttcaagaccagcctggccaatatggtgaaacctcgtcgctactaaaaatacaaaaattagctgggcgtggtggtgcactcgtgtagtccccgctactcaggaggctgagacagaagaattgcttgaacctgggaggcggaggttgcagtaagccgagatcgtgccactgcactccagcctgggtgacagagagagactccacctaaaaaataaaaataaaagattagctggccgtggtggctcacacctgtagtcccagcttcttgggaggctgaggtgggaggatcgcttcagcctgggagttgaaggctgcagtgaactaagattgcaccactgcactccagcctgggtgacagagcaagactctgtctcaaaaaaagagagaggcagccaaaaggagatttgggtgggagaaggaagagaagaagacagagacagggactggagtgagacagccactagctgagaaacgtctggagccaccagaagctgcaagagtcagttctcccctgggtccccatggagaggctcagccctgccgatatcttgatttcagacttccaacctccagaacttcaagagaataaattactattgttcaagctacccagtttatggtaatttgttagagcagccgtaggaagctaaaccacagggttaagggggatagaatgatggggtcaaggaggtggaattctattttcacagacatatgaaggtaaggagggggccatggggctttctggggaacggcattccaggcagagggaacagcaaatgaaaagtctcagacccatgtccaagcgcggtggctcacgcctgtaatcccaacactttgggagaccgaggcaggtagatcacctgacatcaagagttcgagaccagcctgaccaacatgaagaaactccgtctctactaaaaacacaaaaaatcagccaagtgtggtggcacatgcctgtaatcccagctactccggaggctgaggcaggaaaatcgcttgaacccaggagatagaggctgcagtgagccaagatcgagccactgcactccagcctgggcaacaagagcgatactcgatctcaaaaaaaaaaaaaaaaaggaaaaggaaaaaaagaagtctcagaccccaggacacaaccacgcaggcacacacagacaggcccagaaaccacagctacacacacagagggacacaccaattggacgccatggcctggccagcactcaagacaccaacccacagcatcccacgcggaaatgagcaactctcactcacagggacagacagcagggctcccacaaaccctcaagtcccttctctgggacttatatagcctcttatgcagggatgggagggtggagggttggggtactgacaccactgttggtaccctcatcttgggggggtggtccttcaacctgcagccccctccccaagcccaccaaggagtgtgaggaattggaactgggaggggttggtcttaagactggaaatctccaaggggcactagcggggtcagagggaggggcttagagaagccagagagtccaagctccgccccccgacgctgccaaccctcacccccctctatccccccaccctccgcccctggcgcggttgtcctccctccggcttgtcccagacgcctgagactgaactcaacaagcggctgactcagtccttagcgtcacccgcaagatcccccccaccccggcccccagcgaaacaggtcggggcacggccgagcaagcaagggtgcgggtggcgttgggaggggagggcacagctcccgtcccctcctccaaggcccgcagggcgaccactgcggccccgaccgcgcgtcgggagggggcgcgctgcgctgggcgccgaggatagctggtcccaccgccaggcagggcgcgacccgcgcgggccccctcccgacgccccgggcgggttcccacgctctgcgtcccgcgcccccgccgaccggtcgggccggttccagccccagcccgcgccccgccccacggcctaagctttgggggagacggaggggggagcgcagacctagttagggggggcacggcgggtgaggcgaggactaggagatggggacgaggtctatggaaacgtctgctgccggtgggggggtcttgggggatccatgggtggggtgacagcttgggggcatccttgaaaggacttgagtatttgagaccgtgaaagagactcgtggggggtggagggcgtgtagggagtggttcccacagcccaactcggaggactgagcccgctccactccgggcgatccgggctccgggcgccgcgcgcgccggtgattcacctgtcgaagggcggggcagccgcgggctcattcacctgtcggcagtattccaggcgcggagctccactgcgcaggcgcccggccccaccgctcgccctcccaggtgtgtggctccaggtaaggtcacacttttccccatcccgccccaccttcgcagaccccccagccccaggaaaccctctcagtcaggctcagccctccacaaaggtgagcccgagtgggagatccagccaaaataaatgtaggtgtaacttcaaagcggctcttcttggtctaaaatcaccccagacccacccagcttgggcctgacccagtacttggcacacatgatgctgaataaatgaatacattaatgagtcaatcaatggctactgcgtgaactgctgttattaatgatagcatgaaaggagccaagcatttcctcataaccttgagagacttctccttagagcacctgtttcctgcctccctaccattattatttataataatgcctatgttgagcacatactatattctgagcacttaatgtatgttgagtgcatacaggagttattattgccccattttccagatgcaaaaactgaggctcaaaaagcttgaatgctcaaggtgtcccagaccccagaatttaagctgagctctttctgtctctgctcagctccttcccagcctctgctctgctccctgcaacctcttgcctttccttgtgatatctaacaactaaattgttaagtcccttcacagtcgccagtgaagcattccctatttcacaggtgcaatgatgatcagagagggaaagtgactagcccaaagtcacactgcaagtaagtggcagtgtgggactgtattataggcctcctatgtccccctccactaaatgttgagagatgggaggggtgtggagggtgtgagccactgcgattggtccctgatagtttgttgattgaataat
